(19) United States
(12) Patent Application Publication
(10) Pub. No.: US 2026/0022361 A1
(43) Pub. Date: Jan. 22, 2026

(54) ENGINEERED PROTEINS AND METHODS OF USE THEREOF

(71) Applicant: Pairwise Plants Services, Inc., Durham, NC (US)

(72) Inventors: Sharon Leigh Guffy, Durham, NC (US); Joseph Matthew Watts, Cary, NC (US)

(21) Appl. No.: 19/270,627

(22) Filed: Jul. 16, 2025

Related U.S. Application Data
(60) Provisional application No. 63/672,465, filed on Jul. 17, 2024.

(51) Int. Cl. C12N 9/22; C12N 9/12; C12N 9/78; C12N 15/11; C12N 15/90

(52) U.S. Cl. CPC C12N 9/226; C12N 9/1276; C12N 9/78; C12N 15/11; C12N 15/902; C12Y 207/07049; C07K 2319/00; C12N 2310/20

(57) ABSTRACT

Described herein are engineered proteins and methods of use of such proteins. A protein described herein may include an amino acid sequence having at least 70% sequence identity to SEQ ID NO:386 when optimally aligned thereto, wherein the amino acid sequence, when optimally aligned to SEQ ID NO:386, has an arginine residue at amino acid residue 14, 152, 156, 157, 159, 160, 165, 167, 168, 169, 251, 257, 260, 264, 272, 497, 653, 657, 660, 662, 1043, 1045, 1092, 1093, 1096, 1127, 1129, 1130, 1132, and/or 1133 corresponding to the amino acid residue position numbering of SEQ ID NO:386. Also described herein are complexes, compositions, and systems including a protein of the present invention, each of which may be used for modifying and/or editing a target nucleic acid.

### STATEMENT REGARDING ELECTRONIC FILING OF A SEQUENCE LISTING

[0001] A Sequence Listing in XML format, entitled 1499-155_ST26.xml, 873,243 bytes in size, generated on Jul. 14, 2025, and filed herewith, is hereby incorporated by reference in its entirety for its disclosures.

### FIELD

[0002] This invention relates to engineered proteins (e.g., engineered enzymes) and to methods of use of such proteins. The invention further relates to compositions and systems for modifying or editing a target nucleic acid.

### BACKGROUND OF THE INVENTION

[0003] Type II CRISPR endonucleases, including the widely used SpCas9, share a common mechanism for DNA cleavage. Enzymes in this family contain two nuclease domains (HNH and RuvC), each of which cleaves a single DNA strand. When the Cas9-sgRNA complex (or Cas9-crRNA-trRNA complex) binds its target DNA sequence, the target DNA strand binds to the RNA spacer sequence while the nontarget DNA strand forms a single-stranded loop. The HNH domain of Cas9 cleaves the target DNA strand, and the RuvC domain cleaves the nontarget strand (FIG. 1). As illustrated in FIG. 1, for Type II CRISPR endonucleases (e.g., Cas9), the target and nontarget DNA strands are cleaved simultaneously by the HNH and RuvC domains, respectively, forming blunt-ended double strand breaks.

[0004] Unlike the Type II CRISPR endonucleases, the Type V CRISPR endonucleases (such as Cas12a) have only a single nuclease domain that sequentially cleaves both DNA strands beginning with the nontarget strand. As illustrated in FIG. 2, for Type V endonucleases (e.g., Cas12a), the RuvC domain cleaves the nontarget and target DNA strands sequentially, resulting in staggered double-strand breaks.

[0005] Although Type II and Type V CRISPR endonucleases perform similar functions, their mechanisms and structures are highly divergent. The two different types are thought to have evolved from different precursors, and only the RuvC domain shares any significant sequence or structural homology across the two types. Type V CRISPR endonucleases lack the HNH domain responsible for target strand cleavage in Type II enzymes. Instead, the RuvC domain in Type V CRISPR endonucleases cleaves both DNA strands sequentially (FIG. 2) beginning with the nontarget strand. Therefore, mutating the catalytic residue of the RuvC domain prevents all nuclease activity and produces a deactivated enzyme rather than producing a target strand nickase. A nontarget strand nickase mutation has been identified in Cas12a; however, this mutation is outside the RuvC domain and is thought to function by reducing the overall catalytic efficiency of the enzyme.

### SUMMARY OF THE INVENTION

[0006] A first aspect of the present invention is directed to a protein comprising an amino acid sequence having at least 70%, 75%, 80%, 85%, 90%, 95%, 96%, 97%, 98%, 99% or more sequence identity to SEQ ID NO:386 when optimally aligned thereto, wherein the amino acid sequence, when optimally aligned to SEQ ID NO:386, has an arginine residue at amino acid residue 14, 152, 156, 157, 159, 160, 165, 167, 168, 169, 251, 257, 260, 264, 272, 497, 653, 657, 660, 662, 1043, 1045, 1092, 1093, 1096, 1127, 1129, 1130, 1132, and/or 1133 corresponding to the amino acid residue position numbering of SEQ ID NO:386.

[0007] Another aspect of the present invention is directed to a protein comprising an amino acid sequence having at least 70%, 75%, 80%, 85%, 90%, 95%, 96%, 97%, 98%, 99% or more sequence identity to SEQ ID NO:346 when optimally aligned thereto, wherein the amino acid sequence, when optimally aligned to SEQ ID NO:346, has an arginine residue at amino acid residue 14, 152, 156, 157, 159, 160, 165, 167, 168, 169, 251, 257, 260, 264, 272, 497, 653, 657, 660, 662, 1043, 1045, 1092, 1093, 1096, 1127, 1129, 1130, 1132, and/or 1133 corresponding to the amino acid residue position numbering of SEQ ID NO:346.

[0008] An additional aspect of the present invention is directed to a complex comprising: a guide nucleic acid; and a protein comprising an amino acid sequence having at least 70%, 75%, 80%, 85%, 90%, 95%, 96%, 97%, 98%, 99% or more sequence identity to SEQ ID NO:386when optimally aligned thereto, wherein the amino acid sequence, when optimally aligned to SEQ ID NO:386, has an arginine residue at amino acid residue 14, 152, 156, 157, 159, 160, 165, 167, 168, 169, 251, 257, 260, 264, 272, 497, 653, 657, 660, 662, 1043, 1045, 1092, 1093, 1096, 1127, 1129, 1130, 1132, and/or 1133 corresponding to the amino acid residue position numbering of SEQ ID NO:386.

[0009] Another aspect of the present invention is directed to a complex comprising: a guide nucleic acid; and a protein comprising an amino acid sequence having at least 70%, 75%, 80%, 85%, 90%, 95%, 96%, 97%, 98%, 99% or more sequence identity to SEQ ID NO:346 when optimally aligned thereto, wherein the amino acid sequence, when optimally aligned to SEQ ID NO:346, has an arginine residue at amino acid residue 14, 152, 156, 157, 159, 160, 165, 167, 168, 169, 251, 257, 260, 264, 272, 497, 653, 657, 660, 662, 1043, 1045, 1092, 1093, 1096, 1127, 1129, 1130, 1132, and/or 1133 corresponding to the amino acid residue position numbering of SEQ ID NO:346.

[0010] A further aspect of the present invention is directed to a protein comprising an amino acid sequence having at least 70%, 75%, 80%, 85%, 90%, 95%, 96%, 97%, 98%, 99% or 100% sequence identity to one or more of SEQ ID NOs:356-385 and 387-420. In some embodiments, a protein of the present invention comprises one of SEQ ID NOs:356-385 and 387-420 and the protein may optionally be present in a complex with a guide nucleic acid and/or optionally fused to a polypeptide (e.g., a polypeptide of interest).

[0011] Another aspect of the present invention is an expression cassette codon optimized for expression in an organism, comprising a polynucleotide encoding a promoter sequence, and a polynucleotide encoding a protein comprising an amino acid sequence having at least 70%, 75%, 80%, 85%, 90%, 95%, 96%, 97%, 98%, 99% or more sequence identity to SEQ ID NO:386 when optimally aligned thereto, wherein the amino acid sequence, when optimally aligned to SEQ ID NO:386, has an arginine residue at amino acid residue 14, 152, 156, 157, 159, 160, 165, 167, 168, 169, 251, 257, 260, 264, 272, 497, 653, 657, 660, 662, 1043, 1045, 1092, 1093, 1096, 1127, 1129, 1130, 1132, and/or 1133 corresponding to the amino acid residue position numbering of SEQ ID NO:386. The protein may be codon-optimized for expression in the organism.

[0012] An additional aspect of the present invention is an expression cassette codon optimized for expression in an organism, comprising a polynucleotide encoding a promoter sequence, and a polynucleotide encoding a protein comprising an amino acid sequence having at least 70%, 75%, 80%, 85%, 90%, 95%, 96%, 97%, 98%, 99% or more sequence identity to SEQ ID NO:346 when optimally aligned thereto, wherein the amino acid sequence, when optimally aligned to SEQ ID NO:346, has an arginine residue at amino acid residue 14, 152, 156, 157, 159, 160, 165, 167, 168, 169, 251, 257, 260, 264, 272, 497, 653, 657, 660, 662, 1043, 1045, 1092, 1093, 1096, 1127, 1129, 1130, 1132, and/or 1133 corresponding to the amino acid residue position numbering of SEQ ID NO:346. The protein may be codon-optimized for expression in the organism.

[0013] A further aspect of the present invention is directed to a method of modifying a target nucleic acid in a cell, the method comprising introducing an expression cassette and/or vector of the present invention into the cell, thereby modifying the target nucleic acid in the cell.

[0014] An additional aspect of the present invention is directed to a method for producing a protein comprising an amino acid sequence having at least 70%, 75%, 80%, 85%, 90%, 95%, 96%, 97%, 98%, 99% or more sequence identity to SEQ ID NO:386 when optimally aligned thereto, wherein the amino acid sequence, when optimally aligned to SEQ ID NO:386, has an arginine residue at amino acid residue 14, 152, 156, 157, 159, 160, 165, 167, 168, 169, 251, 257, 260, 264, 272, 497, 653, 657, 660, 662, 1043, 1045, 1092, 1093, 1096, 1127, 1129, 1130, 1132, and/or 1133 corresponding to the amino acid residue position numbering of SEQ ID NO:386, the method comprising culturing a cell or group of cells that have been transformed with a nucleic acid encoding said protein; and isolating the protein, thereby producing the protein.

[0015] A further aspect of the present invention is directed to a method of modifying a target nucleic acid, the method comprising contacting the target nucleic acid with a guide nucleic acid and a protein comprising an amino acid sequence having at least 70%, 75%, 80%, 85%, 90%, 95%, 96%, 97%, 98%, 99% or more sequence identity to SEQ ID NO:386 when optimally aligned thereto, wherein the amino acid sequence, when optimally aligned to SEQ ID NO:386, has an arginine residue at amino acid residue 14, 152, 156, 157, 159, 160, 165, 167, 168, 169, 251, 257, 260, 264, 272, 497, 653, 657, 660, 662, 1043, 1045, 1092, 1093, 1096, 1127, 1129, 1130, 1132, and/or 1133 corresponding to the amino acid residue position numbering of SEQ ID NO:386, thereby modifying the target nucleic acid.

[0016] An additional aspect of the present invention is directed to a method for producing a protein comprising an amino acid sequence having at least 70%, 75%, 80%, 85%, 90%, 95%, 96%, 97%, 98%, 99% or more sequence identity to SEQ ID NO:346 when optimally aligned thereto, wherein the amino acid sequence, when optimally aligned to SEQ ID NO:346, has an arginine residue at amino acid residue 14, 152, 156, 157, 159, 160, 165, 167, 168, 169, 251, 257, 260, 264, 272, 497, 653, 657, 660, 662, 1043, 1045, 1092, 1093, 1096, 1127, 1129, 1130, 1132, and/or 1133 corresponding to the amino acid residue position numbering of SEQ ID NO:346, the method comprising culturing a cell or group of cells that have been transformed with a nucleic acid encoding said protein; and isolating the protein, thereby producing the protein.

[0017] A further aspect of the present invention is directed to a method of modifying a target nucleic acid, the method comprising contacting the target nucleic acid with a guide nucleic acid and a protein comprising an amino acid sequence having at least 70%, 75%, 80%, 85%, 90%, 95%, 96%, 97%, 98%, 99% or more sequence identity to SEQ ID NO:346 when optimally aligned thereto, wherein the amino acid sequence, when optimally aligned to SEQ ID NO:346, has an arginine residue at amino acid residue 14, 152, 156, 157, 159, 160, 165, 167, 168, 169, 251, 257, 260, 264, 272, 497, 653, 657, 660, 662, 1043, 1045, 1092, 1093, 1096, 1127, 1129, 1130, 1132, and/or 1133 corresponding to the amino acid residue position numbering of SEQ ID NO:346, thereby modifying the target nucleic acid.

[0018] It is noted that aspects of the invention described with respect to one embodiment, may be incorporated in a different embodiment although not specifically described relative thereto. That is, all embodiments and/or features of any embodiment can be combined in any way and/or combination. Applicant reserves the right to change any originally filed claim and/or file any new claim accordingly, including the right to be able to amend any originally filed claim to depend from and/or incorporate any feature of any other claim or claims although not originally claimed in that manner. These and other objects and/or aspects of the present invention are explained in detail in the specification set forth below. Further features, advantages and details of the present invention will be appreciated by those of ordinary skill in the art from a reading of the figures and the detailed description of the preferred embodiments that follow, such description being merely illustrative of the present invention.

### BRIEF DESCRIPTION OF THE DRAWINGS

[0019] FIG. 1 is an illustration depicting the mechanism of action for Type II CRISPR endonucleases.

[0020] FIG. 2 is an illustration depicting the mechanism of action for Type V CRISPR endonucleases.

[0021] FIG. 3 is a schematic illustrating an optimal alignment of SEQ ID NO:386 and SEQ ID NOs:356 according to some embodiment of the present invention.

### DETAILED DESCRIPTION

[0022] The present invention now will be described hereinafter with reference to the accompanying drawings and examples, in which embodiments of the invention are shown. This description is not intended to be a detailed catalog of all the different ways in which the invention may be implemented, or all the features that may be added to the instant invention. For example, features illustrated with respect to one embodiment may be incorporated into other embodiments, and features illustrated with respect to a particular embodiment may be deleted from that embodiment. Thus, the invention contemplates that in some embodiments of the invention, any feature or combination of features set forth herein can be excluded or omitted. In addition, numerous variations and additions to the various embodiments suggested herein will be apparent to those skilled in the art in light of the instant disclosure, which do not depart from the instant invention. Hence, the following descriptions are intended to illustrate some particular embodiments of the invention, and not to exhaustively specify all permutations, combinations and variations thereof.

[0023] Unless otherwise defined, all technical and scientific terms used herein have the same meaning as commonly understood by one of ordinary skill in the art to which this invention belongs. The terminology used in the description of the invention herein is for the purpose of describing particular embodiments only and is not intended to be limiting of the invention.

[0024] All publications, patent applications, patents and other references cited herein are incorporated by reference in their entireties for the teachings relevant to the sentence and/or paragraph in which the reference is presented.

[0025] Unless the context indicates otherwise, it is specifically intended that the various features of the invention described herein can be used in any combination. Moreover, the present invention also contemplates that in some embodiments of the invention, any feature or combination of features set forth herein can be excluded or omitted. To illustrate, if the specification states that a composition comprises components A, B and C, it is specifically intended that any of A, B or C, or a combination thereof, can be omitted and disclaimed singularly or in any combination.

[0026] As used in the description of the invention and the appended claims, the singular forms “a,” “an” and “the” are intended to include the plural forms as well, unless the context clearly indicates otherwise.

[0027] Also as used herein, “and/or” refers to and encompasses any and all possible combinations of one or more of the associated listed items, as well as the lack of combinations when interpreted in the alternative (“or”).

[0028] The term “about,” as used herein when referring to a measurable value such as an amount or concentration and the like, is meant to encompass variations of ±10%, ±5%, ±1%, ±0.5%, or even ±0.1% of the specified value as well as the specified value. For example, “about X” where X is the measurable value, is meant to include X as well as variations of ±10%, ±5%, ±1%, ±0.5%, or even ±0.1% of X. A range provided herein for a measurable value may include any other range and/or individual value therein.

[0029] As used herein, phrases such as “between X and Y” and “between about X and Y” should be interpreted to include X and Y. As used herein, phrases such as “between about X and Y” mean “between about X and about Y” and phrases such as “from about X to Y” mean “from about X to about Y.”

[0030] Recitation of ranges of values herein are merely intended to serve as a shorthand method of referring individually to each separate value falling within the range, unless otherwise indicated herein, and each separate value is incorporated into the specification as if it were individually recited herein. For example, if the range 10 to 15 is disclosed, then 11, 12, 13, and 14 are also disclosed.

[0031] The term “comprise,” “comprises” and “comprising” as used herein, specify the presence of the stated features, integers, steps, operations, elements, and/or components, but do not preclude the presence or addition of one or more other features, integers, steps, operations, elements, components, and/or groups thereof.

[0032] As used herein, the transitional phrase “consisting essentially of” means that the scope of a claim is to be interpreted to encompass the specified materials or steps recited in the claim and those that do not materially affect the basic and novel characteristic(s) of the claimed invention. Thus, the term “consisting essentially of” when used in a claim of this invention is not intended to be interpreted to be equivalent to “comprising.”

[0033] As used herein, the terms “increase,” “increasing,” “enhance,” “enhancing,” “improve” and “improving” (and grammatical variations thereof) describe an elevation of at least about 5%, 10%, 15%, 20%, 25%, 30%, 35%, 40%, 45%, 50%, 55%, 60%, 65%, 70%, 75%, 80%, 85%, 90%, 95%, 100%, 150%, 200%, 300%, 400%, 500% or more such as compared to another measurable property or quantity (e.g., a control value).

[0034] As used herein, the terms “reduce,” “reduced,” “reducing,” “reduction,” “diminish,” and “decrease” (and grammatical variations thereof), describe, for example, a decrease of at least about 5%, 10%, 15%, 20%, 25%, 30%, 35%, 40%, 45%, 50%, 55%, 60%, 65%, 70%, 75%, 80%, 85%, 90%, 95%, 97%, 98%, 99%, or 100% such as compared to another measurable property or quantity (e.g., a control value). In some embodiments, the reduction can result in no or essentially no (i.e., an insignificant amount, e.g., less than about 10% or even 5%) detectable activity or amount.

[0035] A “heterologous nucleotide sequence” or a “recombinant nucleotide sequence” is a nucleotide sequence not naturally associated with a host cell into which it is introduced, including non-naturally occurring multiple copies of a naturally occurring nucleotide sequence.

[0036] A “native” or “wild-type” nucleic acid, nucleotide sequence, polypeptide or amino acid sequence refers to a naturally occurring or endogenous nucleic acid, nucleotide sequence, polypeptide or amino acid sequence. Thus, for example, a “native nucleic acid” is a nucleic acid that is naturally occurring in or endogenous to a reference organism. A “homologous” nucleic acid sequence is a nucleotide sequence naturally associated with a host cell into which it is introduced.

[0037] As used herein, the terms “nucleic acid,” “nucleic acid molecule,” “nucleotide sequence” and “polynucleotide” refer to RNA or DNA that is linear or branched, single or double stranded, or a hybrid thereof. The term also encompasses RNA/DNA hybrids. When dsRNA is produced synthetically, less common bases, such as inosine, 5-methylcytosine, 6-methyladenine, hypoxanthine and others can also be used for antisense, dsRNA, and ribozyme pairing. For example, polynucleotides that contain C-5 propyne analogues of uridine and cytidine have been shown to bind RNA with high affinity and to be potent antisense inhibitors of gene expression. Other modifications, such as modification to the phosphodiester backbone, or the 2′-hydroxy in the ribose sugar group of the RNA can also be made.

[0038] As used herein, the term “nucleotide sequence” refers to a heteropolymer of nucleotides or the sequence of these nucleotides from the 5′ to 3′ end of a nucleic acid molecule and includes DNA or RNA molecules, including cDNA, a DNA fragment or portion, genomic DNA, synthetic (e.g., chemically synthesized) DNA, plasmid DNA, mRNA, and anti-sense RNA, any of which can be single stranded or double stranded. The terms “nucleotide sequence” “nucleic acid,” “nucleic acid molecule,” “nucleic acid construct,” “recombinant nucleic acid,” “oligonucleotide” and “polynucleotide” are also used interchangeably herein to refer to a heteropolymer of nucleotides. Nucleic acid molecules and/or nucleotide sequences provided herein are presented herein in the 5′ to 3′ direction, from left to right and are represented using the standard code for representing the nucleotide characters as set forth in the U.S. sequence rules, 37 CFR §§ 1.821-1.825 and the World Intellectual Property Organization (WIPO) Standard ST.25. A “5′ region” as used herein can mean the region of a polynucleotide that is nearest the 5′ end of the polynucleotide. Thus, for example, an element in the 5′ region of a polynucleotide can be located anywhere from the first nucleotide located at the 5′ end of the polynucleotide to the nucleotide located halfway through the polynucleotide. A “3′ region” as used herein can mean the region of a polynucleotide that is nearest the 3′ end of the polynucleotide. Thus, for example, an element in the 3′ region of a polynucleotide can be located anywhere from the first nucleotide located at the 3′ end of the polynucleotide to the nucleotide located halfway through the polynucleotide.

[0039] As used herein, the term “gene” refers to a nucleic acid molecule capable of being used to produce mRNA, antisense RNA, miRNA, anti-microRNA antisense oligodeoxyribonucleotide (AMO) and the like. Genes may or may not be capable of being used to produce a functional protein or gene product. Genes can include both coding and non-coding regions (e.g., introns, regulatory elements, promoters, enhancers, termination sequences and/or 5′ and 3′ untranslated regions).

[0040] A polynucleotide, gene, or polypeptide may be “isolated” by which is meant a nucleic acid or polypeptide that is substantially or essentially free from components normally found in association with the nucleic acid or polypeptide, respectively, in its natural state. In some embodiments, such components include other cellular material, culture medium from recombinant production, and/or various chemicals used in chemically synthesizing the nucleic acid or polypeptide.

[0041] The term “mutation” refers to point mutations (e.g., missense, or nonsense, or insertions or deletions of single base pairs that result in frame shifts), insertions, deletions, and/or truncations. When the mutation is a substitution of a residue within an amino acid sequence with another residue, or a deletion or insertion of one or more residues within a sequence, the mutations are typically described by identifying the original residue followed by the position of the residue within the sequence and by the identity of the newly substituted residue.

[0042] As used herein, a “non-natural mutation” refers to a mutation that is generated through human intervention and differs from mutations found in the same gene or polypeptide that have occurred in nature (e.g., occurred naturally and not as a result of a modification made by a human).

[0043] The terms “complementary” or “complementarity,” as used herein, refer to the natural binding of polynucleotides under permissive salt and temperature conditions by base-pairing. For example, the sequence “A—G—T” (5′ to 3′) binds to the complementary sequence “T—C—A” (3′ to 5′). Complementarity between two single-stranded molecules may be “partial,” in which only some of the nucleotides bind, or it may be complete when total complementarity exists between the single stranded molecules. The degree of complementarity between nucleic acid strands has significant effects on the efficiency and strength of hybridization between nucleic acid strands.

[0044] “Complement” as used herein can mean 100% complementarity with the comparator nucleotide sequence or it can mean less than 100% complementarity (e.g., “substantially complementary,” such as about 70%, 71%, 72%, 73%, 74%, 75%, 76%, 77%, 78%, 79%, 80%, 81%, 82%, 83%, 84%, 85%, 86%, 87%, 88%, 89%, 90%, 91%, 92%, 93%, 94%, 95%, 96%, 97%, 98%, 99%, and the like, complementarity).

[0045] A “portion” or “fragment” of a nucleotide sequence or polypeptide (including a domain) will be understood to mean a nucleotide sequence or polypeptide of reduced length (e.g., reduced by 1, 2, 3, 4, 5, 6, 7, 8, 9, 10, 11, 12, 13, 14, 15, 16, 17, 18, 19, 20 or more residue(s) (e.g., nucleotide(s) or peptide(s)) relative to a reference nucleotide sequence or polypeptide, respectively, and comprising, consisting essentially of and/or consisting of a nucleotide sequence or polypeptide of contiguous residues, respectively, identical or almost identical (e.g., 70%, 71%, 72%, 73%, 74%, 75%, 76%, 77%, 78%, 79%, 80%, 81%, 82%, 83%, 84%, 85%, 86%, 87%, 88%, 89%, 90%, 91%, 92%, 93%, 94%, 95%, 96%, 97%, 98%, 99% identical) to the reference nucleotide sequence or polypeptide. In some embodiments, a portion of a reference nucleotide sequence or polypeptide is about 5%, 10%, 15%, 20%, 25%, 30%, 35%, 40%, 45%, 50%, 55%, 60%, 65%, 70%, 75%, 80%, 85%, 90%, 95%, 97%, 98%, 99%, or more of the full-length reference nucleotide sequence or polypeptide. Such a nucleic acid fragment or portion according to the invention may be, where appropriate, included in a larger polynucleotide of which it is a constituent. As an example, a repeat sequence of guide nucleic acid of this invention may comprise a portion of a wild-type CRISPR-Cas repeat sequence (e.g., a wild-type Type V CRISPR Cas repeat, e.g., a repeat from the CRISPR Cas system that includes, but is not limited to, Cas12a (Cpf1), Cas12b, Cas12c (C2c3), Cas12d (CasY), Cas12e (CasX), Cas12g, Cas12h, Cas12i, C2c1, C2c4, C2c5, C2c8, C2c9, C2c10, Cas14a, Cas14b, and/or Cas14c, and the like). Similarly, a portion of a polypeptide may be included in a larger polypeptide of which it is a constituent.

[0046] Different nucleic acids or proteins having homology are referred to herein as “homologues.” The term homologue includes homologous sequences from the same and other species and orthologous sequences from the same and other species. “Homology” refers to the level of similarity between two or more nucleic acid and/or amino acid sequences in terms of percent of positional identity (i.e., sequence similarity or identity). Homology also refers to the concept of similar functional properties among different nucleic acids or proteins. Thus, the compositions and methods of the invention further comprise homologues to the nucleotide sequences and polypeptides of this invention. “Orthologous” and “orthologs” as used herein, refers to homologous nucleotide sequences and/or amino acid sequences in different species that arose from a common ancestral gene during speciation. A homologue or ortholog of a nucleotide sequence of this invention has a substantial sequence identity (e.g., at least about 70%, 71%, 72%, 73%, 74%, 75%, 76%, 77%, 78%, 79%, 80%, 81%, 82%, 83%, 84%, 85%, 86%, 87%, 88%, 89%, 90%, 91%, 92%, 93%, 94%, 95%, 96%, 97%, 98%, 99%, 99.5% or 100%) to said nucleotide sequence of the invention.

[0047] As used herein “sequence identity” refers to the extent to which two optimally aligned polynucleotide or polypeptide sequences are invariant throughout a window of alignment of components, e.g., nucleotides or amino acids. “Identity” can be readily calculated by known methods including, but not limited to, those described in: Computational Molecular Biology (Lesk, A. M., ed.) Oxford University Press, New York (1988); Biocomputing: Informatics and Genome Projects (Smith, D. W., ed.) Academic Press, New York (1993); Computer Analysis of Sequence Data, Part I (Griffin, A. M., and Griffin, H. G., eds.) Humana Press, New Jersey (1994); Sequence Analysis in Molecular Biology (von Heinje, G., ed.) Academic Press (1987); and Sequence Analysis Primer (Gribskov, M. and Devereux, J., eds.) Stockton Press, New York (1991).

[0048] As used herein, the term “percent sequence identity” or “percent identity” refers to the percentage of identical nucleotides in a linear polynucleotide sequence of a reference (“query”) polynucleotide molecule (or its complementary strand) as compared to a test (“subject”) polynucleotide molecule (or its complementary strand) when the two sequences are optimally aligned. In some embodiments, “percent identity” can refer to the percentage of identical amino acids in an amino acid sequence as compared to a reference polypeptide.

[0049] As used herein, the phrase “substantially identical,” or “substantial identity” in the context of two nucleic acid molecules, nucleotide sequences or protein sequences, refers to two or more sequences or subsequences that have at least about 70%, 71%, 72%, 73%, 74%, 75%, 76%, 77%, 78%, 79%, 80%, 81%, 82%, 83%, 84%, 85%, 86%, 87%, 88%, 89%, 90%, 91%, 92%, 93%, 94%, 95%, 96%, 97%, 98%, 99%, 99.5% or 100% nucleotide or amino acid residue identity, when compared and aligned for maximum correspondence, as measured using one of the following sequence comparison algorithms or by visual inspection. In some embodiments of the invention, the substantial identity exists over a region of consecutive nucleotides of a nucleotide sequence of the invention that is about 10 nucleotides to about 20 nucleotides, about 10 nucleotides to about 25 nucleotides, about 10 nucleotides to about 30 nucleotides, about 15 nucleotides to about 25 nucleotides, about 30 nucleotides to about 40 nucleotides, about 50 nucleotides to about 60 nucleotides, about 70 nucleotides to about 80 nucleotides, about 90 nucleotides to about 100 nucleotides, or more nucleotides in length, and any range therein, up to the full length of the sequence. In some embodiments, the nucleotide sequences can be substantially identical over at least about 20 nucleotides (e.g., about 20, 21, 22, 23, 24, 25, 26, 27, 28, 29, 30, 31, 32, 33, 34, 35, 36, 37, 38, 39, 40 nucleotides). In some embodiments, a substantially identical nucleotide or protein sequence performs substantially the same function as the nucleotide (or encoded protein sequence) to which it is substantially identical.

[0050] For sequence comparison, typically one sequence acts as a reference sequence to which one or more test sequence(s) are compared. When using a sequence comparison algorithm, test and reference sequences are entered into a computer, subsequence coordinates are designated if necessary, and sequence algorithm program parameters are designated. The sequence comparison algorithm then calculates the percent sequence identity for the test sequence(s) relative to the reference sequence, based on the designated program parameters.

[0051] Optimal alignment of sequences for aligning a comparison window are well known to those skilled in the art and may be conducted by tools such as the local homology algorithm of Smith and Waterman, the homology alignment algorithm of Needleman and Wunsch, the search for similarity method of Pearson and Lipman, and optionally by computerized implementations of these algorithms such as GAP, BESTFIT, FASTA, and TFASTA available as part of the GCG® Wisconsin Package® (Accelrys Inc., San Diego, CA) as well as web-based alignment programs such as Clustal Omega, EMBOSS Needle, EMBOSS Stretcher, EMBOSS Water, LALIGN, GGSEARCH2SEQ, EMBOS Cons, Kalign, MAFFT, MUSCLE, and T-Coffee. In some embodiments, an “optimal alignment” of two sequences (e.g., two polypeptide sequences or two nucleotide sequences) is the highest scoring alignment of the two sequences, optionally from an alignment conducted by a tool such as the local homology algorithm of Smith and Waterman, the homology alignment algorithm of Needleman and Wunsch, the search for similarity method of Pearson and Lipman, GAP, BESTFIT, FASTA, and TFASTA available as part of the GCG® Wisconsin Package® (Accelrys Inc., San Diego, CA), Clustal Omega, EMBOSS Needle, EMBOSS Stretcher, EMBOSS Water, LALIGN, GGSEARCH2SEQ, EMBOS Cons, Kalign, MAFFT, MUSCLE, and/or T-Coffee. In some embodiments, an “optimal alignment” of two sequences (e.g., two polypeptide sequences or two nucleotide sequences) is the alignment of the two sequences that provides the highest percent sequence identity, optionally allowing for one or more gap(s) to be introduced into one or both sequences. An “identity fraction” for aligned segments of a test sequence and a reference sequence is the number of identical components which are shared by the two aligned sequences divided by the total number of components in the reference sequence segment, e.g., the entire reference sequence or a smaller defined part of the reference sequence. Percent sequence identity is represented as the identity fraction multiplied by 100. The comparison of one or more polynucleotide sequences may be to a full-length polynucleotide sequence or a portion thereof, or to a longer polynucleotide sequence. For purposes of this invention “percent identity” and/or optimal alignment may be determined using Basic Local Alignment Search Tool (BLAST) provided by the National Center for Biotechnology Information such as BLASTX, for translated nucleotide sequences, BLASTN for polynucleotide sequences, or BLASTP for polypeptide sequences.

[0052] Two nucleotide sequences may also be considered substantially complementary when the two sequences hybridize to each other under stringent conditions. In some representative embodiments, two nucleotide sequences considered to be substantially complementary hybridize to each other under highly stringent conditions.

[0053] “Stringent hybridization conditions” and “stringent hybridization wash conditions” in the context of nucleic acid hybridization experiments such as Southern and Northern hybridizations are sequence dependent, and are different under different environmental parameters. An extensive guide to the hybridization of nucleic acids is found in Tijssen Laboratory Techniques in Biochemistry and Molecular Biology-Hybridization with Nucleic Acid Probes part I chapter 2 “Overview of principles of hybridization and the strategy of nucleic acid probe assays” Elsevier, New York (1993). Generally, highly stringent hybridization and wash conditions are selected to be about 5° C. lower than the thermal melting point (Tₘ) for the specific sequence at a defined ionic strength and pH.

[0054] The Tₘ is the temperature (under defined ionic strength and pH) at which 50% of the target sequence hybridizes to a perfectly matched probe. Very stringent conditions are selected to be equal to the Tₘ for a particular probe. An example of stringent hybridization conditions for hybridization of complementary nucleotide sequences which have more than 100 complementary residues on a filter in a Southern or northern blot is 50% formamide with 1 mg of heparin at 42° C., with the hybridization being carried out overnight. An example of highly stringent wash conditions is 0.1 5M NaCl at 72° C. for about 15 minutes. An example of stringent wash conditions is a 0.2× SSC wash at 65° C. for 15 minutes (see, Sambrook, infra, for a description of SSC buffer). Often, a high stringency wash is preceded by a low stringency wash to remove background probe signal. An example of a medium stringency wash for a duplex of, e.g., more than 100 nucleotides, is 1× SSC at 45° C. for 15 minutes. An example of a low stringency wash for a duplex of, e.g., more than 100 nucleotides, is 4-6× SSC at 40° C. for 15 minutes. For short probes (e.g., about 10 to 50 nucleotides), stringent conditions typically involve salt concentrations of less than about 1.0 M Na ion, typically about 0.01 to 1.0 M Na ion concentration (or other salts) at pH 7.0 to 8.3, and the temperature is typically at least about 30° C. Stringent conditions can also be achieved with the addition of destabilizing agents such as formamide. In general, a signal to noise ratio of 2× (or higher) than that observed for an unrelated probe in the particular hybridization assay indicates detection of a specific hybridization. Nucleotide sequences that do not hybridize to each other under stringent conditions are still substantially identical if the proteins that they encode are substantially identical. This can occur, for example, when a copy of a nucleotide sequence is created using the maximum codon degeneracy permitted by the genetic code.

[0055] A polynucleotide and/or recombinant nucleic acid construct of this invention can be codon optimized for expression. In some embodiments, a polynucleotide, nucleic acid construct, expression cassette, and/or vector of the present invention (e.g., that comprises/encodes a polypeptide of the present invention (e.g., an engineered protein), a nucleic acid binding polypeptide (e.g., a DNA binding polypeptide such as a sequence-specific DNA binding domain from a polynucleotide-guided endonuclease, a zinc finger nuclease, a transcription activator-like effector nuclease (TALEN), an Argonaute protein, and/or a CRISPR-Cas effector protein), a guide nucleic acid, a deaminase, and/or a reverse transcriptase) may be codon optimized for expression in an organism (e.g., an animal such as a human, a plant, a fungus, an archaeon, or a bacterium). In some embodiments, the codon optimized nucleic acid constructs, polynucleotides, expression cassettes, and/or vectors of the invention have about 70% to about 99.9% (e.g., 70%, 71%, 72%, 73%, 74%, 75%, 76%, 77%, 78%, 79%, 80%, 81%, 82%, 83%, 84%, 85%, 86%, 87%, 88%, 89%, 90%, 91%, 92%, 93%, 94%, 95%, 96%, 97%, 98%, 99%, 99.5%. 99.9% or 100%) identity or more to the reference nucleic acid constructs, polynucleotides, expression cassettes, and/or vectors but which have not been codon optimized.

[0056] In any of the embodiments described herein, a polynucleotide or nucleic acid construct of the invention may be operatively associated with a variety of promoters and/or other regulatory elements for expression in an organism or cell thereof (e.g., a mammal and/or a mammalian cell, a plant and/or a cell of a plant, etc.). Thus, in some embodiments, a polynucleotide or nucleic acid construct of this invention may further comprise one or more promoters, introns, enhancers, and/or terminators operably linked to one or more nucleotide sequences. In some embodiments, a promoter may be operably associated with an intron (e.g., Ubil promoter and intron). In some embodiments, a promoter associated with an intron maybe referred to as a “promoter region” (e.g., Ubil promoter and intron).

[0057] By “operably linked” or “operably associated” as used herein in reference to polynucleotides, it is meant that the indicated elements are functionally related to each other, and are also generally physically related. Thus, the term “operably linked” or “operably associated” as used herein, refers to nucleotide sequences on a single nucleic acid molecule that are functionally associated. Thus, a first nucleotide sequence that is operably linked to a second nucleotide sequence means a situation when the first nucleotide sequence is placed in a functional relationship with the second nucleotide sequence. For instance, a promoter is operably associated with a nucleotide sequence if the promoter effects the transcription or expression of said nucleotide sequence. Those skilled in the art will appreciate that the control sequences (e.g., promoter) need not be contiguous with the nucleotide sequence to which it is operably associated, as long as the control sequences function to direct the expression thereof. Thus, for example, intervening untranslated, yet transcribed, nucleic acid sequences can be present between a promoter and the nucleotide sequence, and the promoter can still be considered “operably linked” to the nucleotide sequence.

[0058] As used herein, the term “linked,” or “fused” in reference to polypeptides, refers to the covalent attachment of one polypeptide to another. A polypeptide may be linked or fused to another polypeptide (e.g., at the N-terminus or the C-terminus) directly (e.g., via a peptide bond) or through a linker (e.g., a peptide linker). Two polypeptides being directly fused (e.g., a direct linkage) refers to the covalent attachment of one amino acid residue of a first polypeptide of the two polypeptides to an amino acid residue of a second polypeptide of the two polypeptides without an intervening element between the two amino acid residues. For example, first and second polypeptides may be directly linked via a peptide bond between the first and second polypeptides without an intervening element (e.g., a linker) between the first and second polypeptides. Two polypeptides being indirectly fused (e.g., an indirect linkage) refers to an intervening element (e.g., a linker such as a peptide linker) that is present between the two polypeptides and is covalently attached to each, optionally the intervening element may attach one end of a first polypeptide of the two polypeptides to an end of the second polypeptide of the two polypeptides.

[0059] A “fusion protein” as used herein refers to two or more polypeptides that are covalently attached (e.g., directly or indirectly) so that they are transcribed and translated as a single unit and thereby produce a single polypeptide comprising the two or more polypeptides. In some embodiments, the two or more polypeptides may naturally be encoded by separate genes, but, in the form of a fusion protein, are encoded by a single gene. The term “linker” is art-recognized and refers to a chemical group, or a molecule linking two molecules or moieties, e.g., linking two polypeptides or domains of a fusion protein, such as, for example, a CRISPR-Cas effector protein and a peptide tag and/or a polypeptide of interest. A linker may be comprised of a single linking molecule (e.g., a single amino acid) or may comprise more than one linking molecule. In some embodiments, the linker can be an organic molecule, group, polymer, or chemical moiety such as a bivalent organic moiety. In some embodiments, the linker may be an amino acid or it may be a peptide. In some embodiments, the linker is a peptide (e.g., a peptide linker).

[0060] In some embodiments, a peptide linker useful with this invention may be about 2 to about 100 or more amino acids in length, for example, about 2, 3, 4, 5, 6, 7, 8, 9, 10, 11, 12, 13, 14, 15, 16, 17, 18, 19, 20, 21, 22, 23, 24, 25, 26, 27, 28, 29, 30, 31, 32, 33, 34, 35, 36, 37, 38, 39, 40, 41, 42, 43, 44, 45, 46, 47, 48, 49, 50, 51, 52, 53, 54, 55, 56, 57, 58, 59, 60, 61, 62, 63, 64, 65, 66, 67, 68, 69, 70, 71, 72, 73, 74, 75, 76, 77, 78, 79, 80, 81, 82, 83, 84, 85, 86, 87, 88, 89, 90, 91, 92, 93, 94, 95, 96, 97, 98, 99, 100 or more amino acids in length (e.g., about 2 to about 40, about 2 to about 50, about 2 to about 60, about 4 to about 40, about 4 to about 50, about 4 to about 60, about 5 to about 40, about 5 to about 50, about 5 to about 60, about 9 to about 40, about 9 to about 50, about 9 to about 60, about 10 to about 40, about 10 to about 50, about 10 to about 60, or about 2, 3, 4, 5, 6, 7, 8, 9, 10, 11, 12, 13, 14, 15, 16, 17, 18, 19, 20, 21, 22, 23, 24, 25 amino acids to about 26, 27, 28, 29, 30, 31, 32, 33, 34, 35, 36, 37, 38, 39, 40, 41, 42, 43, 44, 45, 46, 47, 48, 49, 50, 51, 52, 53, 54, 55, 56, 57, 58, 59, 60, 61, 62, 63, 64, 65, 66, 67, 68, 69, 70, 71, 72, 73, 74, 75, 76, 77, 78, 79, 80, 81, 82, 83, 84, 85, 86, 87, 88, 89, 90, 91, 92, 93, 94, 95, 96, 97, 98, 99, 100 or more amino acids in length (e.g., about 105, 110, 115, 120, 130, 140 150 or more amino acids in length)). In some embodiments, a peptide linker may be a GS linker. In some embodiments, the peptide linker is a GS linker having 2, 3, or 4 amino acid residues, optionally 2 or 4 amino acid residues. In some embodiments, the peptide linker has one of the amino acid sequences of SEQ ID NOs:1-36. In some embodiments, the peptide linker may comprise an amino acid sequence of CA, CF, (GGS),, GS, SG, GSSG (SEQ ID NO:31), GSSGSS (SEQ ID NO:32), GSSGSSGS (SEQ ID NO:33), (GSS), (SEQ ID NO:34), (GSS),GS (SEQ ID NO:35), S (GGS), (SEQ ID NO:25), SGGS (SEQ ID NO:26), (GSS),G (SEQ ID NO:36), or (GGGGS) n (SEQ ID NO:27), wherein n is an integer of 1-20 (e.g., 1, 2, 3, 4, 5, 6, 7, 8, 9, 10, 11, 12, 13, 14, 15, 16, 17, 18, 19, or 20). In some embodiments, the peptide linker may comprise the amino acid sequence: SGGSGGSGGS (SEQ ID NO:28). In some embodiments, the peptide linker may comprise the amino acid sequence: SGSETPGTSESATPES (SEQ ID NO:29), also referred to as the XTEN linker. In some embodiments, the peptide linker may comprise the amino acid sequence: SGGSSGGSSGSETPGTSESATPESSGGSSGGS (SEQ ID NO:30), also referred to as the GS-XTEN-GS linker.

[0061] As used herein, the term “linked,” or “fused” in reference to polynucleotides, refers to the covalent attachment of one polynucleotide to another polynucleotide. In some embodiments, two or more polynucleotide molecules may be linked by a linker that can be an organic molecule, group, polymer, or chemical moiety such as a bivalent organic moiety. A polynucleotide may be linked or fused to another polynucleotide (at the 5′ end or the 3′ end) via a direct covalent linkage or through one or more linking nucleotides. In some embodiments, a polynucleotide motif of a certain structure may be inserted within another polynucleotide sequence (e.g., extension of the hairpin structure in guide RNA). In some embodiments, the linking nucleotides may be naturally occurring nucleotides. In some embodiments, the linking nucleotides may be non-naturally occurring nucleotides. Two polynucleotides being directly fused (e.g., a direct linkage) refers to the covalent attachment of one nucleotide of a first polynucleotide of the two polynucleotides to a nucleotide of a second polynucleotide of the two polynucleotides without an intervening element between the two polynucleotides. For example, first and second polynucleotides may be directly linked via a phosphodiester bond between the first and second polynucleotides without an intervening element (e.g., a linker) between the first and second polynucleotides. Two polynucleotides being indirectly fused (e.g., an indirect linkage) refers to an intervening element (e.g., a linker such as a polynucleotide linker) that is present between the two polynucleotides and is covalently attached to each, optionally the intervening element attaches one end of a first polynucleotide of the two polynucleotides to an end of the second polynucleotide of the two polynucleotides.

[0062] A “promoter” is a nucleotide sequence that controls or regulates the transcription of a nucleotide sequence (e.g., a coding sequence) that is operably associated with the promoter. The coding sequence controlled or regulated by a promoter may encode a polypeptide and/or a functional RNA. Typically, a “promoter” refers to a nucleotide sequence that contains a binding site for RNA polymerase II and directs the initiation of transcription. In general, promoters are found 5′, or upstream, relative to the start of the coding region of the corresponding coding sequence. A promoter may comprise other elements that act as regulators of gene expression; e.g., a promoter region. These include a TATA box consensus sequence, and often a CAAT box consensus sequence (Breathnach and Chambon, (1981) Annu. Rev. Biochem. 50:349). In plants, the CAAT box may be substituted by the AGGA box (Messing et al., (1983) in Genetic Engineering of Plants, T. Kosuge, C. Meredith and A. Hollaender (eds.), Plenum Press, pp. 211-227). In some embodiments, a promoter region may comprise at least one intron (e.g., SEQ ID NO:37 or SEQ ID NO:38).

[0063] Promoters useful with this invention can include, for example, constitutive, inducible, temporally regulated, developmentally regulated, chemically regulated, tissue-preferred and/or tissue-specific promoters for use in the preparation of recombinant nucleic acid molecules, e.g., “synthetic nucleic acid constructs” or “protein-RNA complex.” These various types of promoters are known in the art.

[0064] The choice of promoter may vary depending on the temporal and spatial requirements for expression, and also may vary based on the host cell to be transformed. Promoters for many different organisms are well known in the art. Based on the extensive knowledge present in the art, the appropriate promoter can be selected for the particular host organism of interest. Thus, for example, much is known about promoters upstream of highly constitutively expressed genes in model organisms and such knowledge can be readily accessed and implemented in other systems as appropriate.

[0065] In some embodiments, a promoter functional in a plant may be used with the constructs of this invention. Non-limiting examples of a promoter useful for driving expression in a plant include the promoter of the RubisCo small subunit gene 1 (PrbcS1), the promoter of the actin gene (Pactin), the promoter of the nitrate reductase gene (Pnr) and the promoter of duplicated carbonic anhydrase gene 1 (Pdca1) (See, Walker et al. Plant Cell Rep. 23:727-735 (2005); Li et al. Gene 403:132-142 (2007); Li et al. Mol Biol. Rep. 37:1143-1154 (2010)). PrbcS1 and Pactin are constitutive promoters and Pnr and Pdca1 are inducible promoters. Pnr is induced by nitrate and repressed by ammonium (Li et al. Gene 403:132-142 (2007)) and Pdca1 is induced by salt (Li et al. Mol Biol. Rep. 37:1143-1154 (2010)). In some embodiments, a promoter useful with this invention is RNA polymerase II (Pol II) promoter. In some embodiments, a U6 promoter or a 7SL promoter from Zea mays may be useful with constructs of this invention. In some embodiments, the U6c promoter and/or 7SL promoter from Zea mays may be useful for driving expression of a guide nucleic acid. In some embodiments, a U6c promoter, U6i promoter and/or 7SL promoter from Glycine max may be useful with constructs of this invention. In some embodiments, the U6c promoter, Ubi promoter and/or 7SL promoter from Glycine max may be useful for driving expression of a guide nucleic acid.

[0066] Examples of constitutive promoters useful for plants include, but are not limited to, cestrum virus promoter (cmp) (U.S. Pat. No. 7,166,770), the rice actin 1 promoter (Wang et al. (1992) Mol. Cell. Biol. 12:3399-3406; as well as U.S. Pat. No. 5,641,876), CaMV 35S promoter (Odell et al. (1985) Nature 313:810-812), CaMV 19S promoter (Lawton et al. (1987) Plant Mol. Biol. 9:315-324), nos promoter (Ebert et al. (1987) Proc. Natl. Acad. Sci USA 84:5745-5749), Adh promoter (Walker et al. (1987) Proc. Natl. Acad. Sci. USA 84:6624-6629), sucrose synthase promoter (Yang & Russell (1990) Proc. Natl. Acad. Sci. USA 87:4144-4148), and the ubiquitin promoter. The constitutive promoter derived from ubiquitin accumulates in many cell types. Ubiquitin promoters have been cloned from several plant species for use in transgenic plants, for example, sunflower (Binet et al., 1991. Plant Science 79:87-94), maize (Christensen et al., 1989. Plant Molec. Biol. 12:619-632), and arabidopsis (Norris et al. 1993. Plant Molec. Biol. 21:895-906). The maize ubiquitin promoter (UbiP) has been developed in transgenic monocot systems and its sequence and vectors constructed for monocot transformation are disclosed in the European patent publication EP0342926. The ubiquitin promoter is suitable for the expression of the nucleotide sequences of the invention in transgenic plants, especially monocotyledons. Further, the promoter expression cassettes described by McElroy et al. (Mol. Gen. Genet. 231:150-160 (1991)) can be easily modified for the expression of the nucleotide sequences of the invention and are particularly suitable for use in monocotyledonous hosts.

[0067] In some embodiments, tissue specific/tissue preferred promoters can be used for expression of a heterologous polynucleotide in a plant cell. Tissue specific or preferred expression patterns include, but are not limited to, green tissue specific or preferred, root specific or preferred, stem specific or preferred, flower specific or preferred or pollen specific or preferred. Promoters suitable for expression in green tissue include many that regulate genes involved in photosynthesis and many of these have been cloned from both monocotyledons and dicotyledons. In one embodiment, a promoter useful with the invention is the maize PEPC promoter from the phosphoenol carboxylase gene (Hudspeth & Grula, Plant Molec. Biol. 12:579-589 (1989)). Non-limiting examples of tissue-specific promoters include those associated with genes encoding the seed storage proteins (such as β-conglycinin, cruciferin, napin and phaseolin), zein or oil body proteins (such as oleosin), or proteins involved in fatty acid biosynthesis (including acyl carrier protein, stearoyl-ACP desaturase and fatty acid desaturases (fad 2-1)), and other nucleic acids expressed during embryo development (such as Bce4, see, e.g., Kridl et al. (1991) Seed Sci. Res. 1:209-219; as well as EP Patent No. 255378). Tissue-specific or tissue-preferential promoters useful for the expression of the nucleotide sequences of the invention in plants, particularly maize, include but are not limited to those that direct expression in root, pith, leaf or pollen. Such promoters are disclosed, for example, in WO 93/07278, incorporated by reference herein for its disclosure of promoters. Other non-limiting examples of tissue specific or tissue preferred promoters useful with the invention the cotton rubisco promoter disclosed in U.S. Pat. No. 6,040,504; the rice sucrose synthase promoter disclosed in U.S. Pat. No. 5,604,121; the root specific promoter described by de Framond (FEBS 290:103-106 (1991); European patent EP 0452269 to Ciba-Geigy); the stem specific promoter described in U.S. Pat. No. 5,625,136 (to Ciba-Geigy) and which drives expression of the maize trpA gene; the cestrum yellow leaf curling virus promoter disclosed in WO 01/73087; and pollen specific or preferred promoters including, but not limited to, ProOsLPS10 and ProOsLPS11 from rice (Nguyen et al. Plant Biotechnol. Reports 9(5):297-306 (2015)), ZmSTK2_USP from maize (Wang et al. Genome 60(6):485-495 (2017)), LAT52 and LAT59 from tomato (Twell et al. Development 109(3):705-713 (1990)), Zm13 (U.S. Pat. No. 10,421,972), PLA2-8 promoter from arabidopsis (U.S. Pat. No. 7,141,424), and/or the ZmC5promoter from maize (International PCT Publication No. WO 1999/042587).

[0068] Additional examples of plant tissue-specific/tissue preferred promoters include, but are not limited to, the root hair-specific cis-elements (RHEs) (KIM ET AL. The Plant Cell 18:2958-2970 (2006)), the root-specific promoters RCc3 (Jeong et al. Plant Physiol. 153:185-197 (2010)) and RB7 (U.S. Pat. No. 5,459,252), the lectin promoter (Lindstrom et al. (1990) Der. Genet. 11:160-167; and Vodkin (1983) Prog. Clin. Biol. Res. 138:87-98), corn alcohol dehydrogenase 1 promoter (Dennis et al. (1984) Nucleic Acids Res. 12:3983-4000), S-adenosyl-L-methionine synthetase (SAMS) (Vander Mijnsbrugge et al. (1996) Plant and Cell Physiology, 37(8):1108-1115), corn light harvesting complex promoter (Bansal et al. (1992) Proc. Natl. Acad. Sci. USA 89:3654-3658), corn heat shock protein promoter (O'Dell et al. (1985) EMBO J. 5:451-458; and Rochester et al. (1986) EMBO J. 5:451-458), pea small subunit RuBP carboxylase promoter (Cashmore, “Nuclear genes encoding the small subunit of ribulose-1,5-bisphosphate carboxylase” pp. 29-39 In: Genetic Engineering of Plants (Hollaender ed., Plenum Press 1983; and Poulsen et al. (1986) Mol. Gen. Genet. 205:193-200), Ti plasmid mannopine synthase promoter (Langridge et al. (1989) Proc. Natl. Acad. Sci. USA 86:3219-3223), Ti plasmid nopaline synthase promoter (Langridge et al. (1989), supra), petunia chalcone isomerase promoter (van Tunen et al. (1988) EMBO J. 7:1257-1263), bean glycine rich protein 1 promoter (Keller et al. (1989) Genes Dev. 3:1639-1646), truncated CaMV 35S promoter (O'Dell et al. (1985) Nature 313:810-812), potato patatin promoter (Wenzler et al. (1989) Plant Mol. Biol. 13:347-354), root cell promoter (Yamamoto et al. (1990) Nucleic Acids Res. 18:7449), maize zein promoter (Kriz et al. (1987) Mol. Gen. Genet. 207:90-98; Langridge et al. (1983) Cell 34:1015-1022; Reina et al. (1990) Nucleic Acids Res. 18:6425; Reina et al. (1990) Nucleic Acids Res. 18:7449; and Wandelt et al. (1989) Nucleic Acids Res. 17:2354), globulin-1 promoter (Belanger et al. (1991) Genetics 129:863-872), α-tubulin cab promoter (Sullivan et al. (1989) Mol. Gen. Genet. 215:431-440), PEPCase promoter (Hudspeth & Grula (1989) Plant Mol. Biol. 12:579-589), R gene complex-associated promoters (Chandler et al. (1989) Plant Cell 1:1175-1183), and chalcone synthase promoters (Franken et al. (1991) EMBO J. 10:2605-2612).

[0069] Useful for seed-specific expression is the pea vicilin promoter (Czako et al. (1992) Mol. Gen. Genet. 235:33-40; as well as the seed-specific promoters disclosed in U.S. Pat. No. 5,625,136. Useful promoters for expression in mature leaves are those that are switched at the onset of senescence, such as the SAG promoter from Arabidopsis (Gan et al. (1995) Science 270:1986-1988).

[0070] In addition, promoters functional in chloroplasts can be used. Non-limiting examples of such promoters include the bacteriophage T3 gene 9 5′ UTR and other promoters disclosed in U.S. Pat. No. 7,579,516. Other promoters useful with the invention include but are not limited to the S-E9 small subunit RuBP carboxylase promoter and the Kunitz trypsin inhibitor gene promoter (Kti3).

[0071] Additional regulatory elements useful with this invention include, but are not limited to, introns, enhancers, termination sequences and/or 5′ and 3′ untranslated regions.

[0072] An intron useful with this invention can be an intron identified in and isolated from a plant and then inserted into an expression cassette to be used in transformation of a plant. As would be understood by those of skill in the art, introns can comprise the sequences required for self-excision and are incorporated into nucleic acid constructs/expression cassettes in frame. An intron can be used either as a spacer to separate multiple protein-coding sequences in one nucleic acid construct, or an intron can be used inside one protein-coding sequence to, for example, stabilize the mRNA. If they are used within a protein-coding sequence, they are inserted “in-frame” with the excision sites included. Introns may also be associated with promoters to improve or modify expression. As an example, a promoter/intron combination useful with this invention includes but is not limited to that of the maize Ubi1 promoter and intron.

[0073] Non-limiting examples of introns useful with the present invention include introns from the ADHI gene (e.g., Adh1-S introns 1, 2 and 6), the ubiquitin gene (Ubi1), the RuBisCO small subunit (rbcS) gene, the RuBisCO large subunit (rbcL) gene, the actin gene (e.g., actin-1 intron), the pyruvate dehydrogenase kinase gene (pdk), the nitrate reductase gene (nr), the duplicated carbonic anhydrase gene 1 (Tdca1), the psbA gene, the atpA gene, or any combination thereof.

[0074] An “editing system” as used herein refers to any site-specific (e.g., sequence-specific) nucleic acid editing system now known or later developed, which system can introduce a modification (e.g., a mutation) in a nucleic acid in target specific manner. For example, an editing system (e.g., a site-and/or sequence-specific editing system) can include, but is not limited to, a CRISPR-Cas editing system, a meganuclease editing system, a zinc finger nuclease (ZFN) editing system, a transcription activator-like effector nuclease (TALEN) editing system, a base editing system and/or a prime editing system, each of which may comprise one or more polypeptide(s) and/or one or more polynucleotide(s) that when present and/or expressed together (e.g., as a system) in a composition and/or cell can modify (e.g., mutate) a target nucleic acid in a sequence specific manner. In some embodiments, an editing system (e.g., a site-and/or sequence-specific editing system) can comprise one or more polynucleotide(s) and/or one or more polypeptide(s), including but not limited to a nucleic acid binding polypeptide (e.g., a DNA binding domain), a nuclease, another polypeptide, and/or a polynucleotide. In some embodiments, a CRISPR-Cas editing system is provided and/or is used that comprises a protein of the present invention.

[0075] In some embodiments, an editing system comprises one or more sequence-specific nucleic acid binding polypeptide(s) (e.g., a DNA binding domain) that can be from, for example, a polynucleotide-guided endonuclease, a CRISPR-Cas endonuclease (e.g., CRISPR-Cas effector protein), a zinc finger nuclease, a transcription activator-like effector nuclease (TALEN) and/or an Argonaute protein. In some embodiments, an editing system comprises one or more cleavage polypeptide(s) (e.g., nucleases) including, but not limited to, an endonuclease (e.g., Fok1), a polynucleotide-guided endonuclease, a CRISPR-Cas endonuclease (e.g., CRISPR-Cas effector protein), a zinc finger nuclease, and/or a transcription activator-like effector nuclease (TALEN).

[0076] A “nucleic acid binding polypeptide” as used herein refers to a polypeptide or domain that binds and/or is capable of binding a nucleic acid (e.g., a target nucleic acid). A DNA binding domain is an exemplary nucleic acid binding polypeptide and may be a site-and/or sequence-specific nucleic acid binding domain. In some embodiments, a nucleic acid binding polypeptide may be a sequence-specific nucleic acid binding polypeptide such as, but not limited to, a sequence-specific binding domain from, for example, a polynucleotide-guided endonuclease, a CRISPR-Cas effector protein (e.g., a CRISPR-Cas endonuclease), a zinc finger nuclease, a transcription activator-like effector nuclease (TALEN) and/or an Argonaute protein. In some embodiments, a nucleic acid binding polypeptide comprises a cleavage domain (e.g., a nuclease domain) such as, but not limited to, an endonuclease (e.g., Fok1), a polynucleotide-guided endonuclease, a CRISPR-Cas endonuclease, a zinc finger nuclease, and/or a transcription activator-like effector nuclease (TALEN). In some embodiments, the nucleic acid binding polypeptide associates with and/or is capable of associating with (e.g., forms a complex with) with one or more nucleic acid molecule(s) (e.g., forms a complex with a guide nucleic acid as described herein), which may direct and/or guide the nucleic acid binding polypeptide to a specific target nucleotide sequence (e.g., a gene locus of a genome) that is complementary to the one or more nucleic acid molecule(s) (or a portion or region thereof), thereby causing the nucleic acid binding polypeptide to bind to the nucleotide sequence at the specific target site. In some embodiments, the nucleic acid binding polypeptide is a CRISPR-Cas effector protein as described herein.

[0077] In some embodiments, an editing system comprises or is a ribonucleoprotein such as an assembled ribonucleoprotein complex (e.g., a ribonucleoprotein that comprises a CRISPR-Cas effector protein, a guide nucleic acid, and optionally a deaminase). In some embodiments, a ribonucleoprotein of an editing system may be assembled together (e.g., a pre-assembled ribonucleoprotein including a CRISPR-Cas effector protein, a guide nucleic acid, and optionally a deaminase) such as when contacted to a target nucleic acid or when introduced into a cell (e.g., a mammalian cell or a plant cell) (e.g., at the time of contacting the components of the ribonucleoprotein to a target nucleic acid and/or at the time of introducing the components of the ribonucleoprotein into a cell). In some embodiments, a ribonucleoprotein of an editing system may assemble into a complex (e.g., a non-covalently bound complex) while a portion of the ribonucleoprotein is contacting a target nucleic acid and/or may assemble after and/or during introduction into a plant cell. In some embodiments, a ribonucleoprotein of an editing system may be contacted to a target nucleic acid and/or may be introduced into a plant cell. In some embodiments, an editing system may be assembled (e.g., into a non-covalently bound complex) when introduced into a plant cell. In some embodiments, a ribonucleoprotein may comprise a protein of the present invention and a guide nucleic acid.

[0078] In some embodiments, an editing system of the present invention comprises a reverse transcriptase, an extended guide nucleic acid, and a CRISPR-Cas effector protein, e.g., a Type II CRISPR-Cas effector protein or Type V CRISPR-Cas effector protein. In some embodiments, the Type V CRISPR-Cas effector protein or Type II CRISPR-Cas effector protein, the reverse transcriptase, and the extended guide nucleic acid may form a complex or may be comprised in a complex that is capable of interacting with a target nucleic acid.

[0079] In some embodiments, a guide nucleic acid further comprises a reverse transcriptase template and may be referred to as an extended guide nucleic acid. An “extended guide nucleic acid” as used herein is a guide nucleic acid as described herein that further comprises a reverse transcriptase template (RTT) and/or a primer binding site (PBS). In some embodiments, an extended guide nucleic acid is an engineered prime editing guide RNA (pegRNA). An extended guide nucleic acid may be a targeted allele guide RNA (tagRNA) or a stabilized targeted allele guide RNA (stagRNA). A “tagRNA” as used herein refers to an extended guide nucleic acid that comprises a PBS and a RTT and has target strand complementarity. A “stagRNA” as used herein refers to a tagRNA that comprises a stabilization motif. A stabilization motif may be present at the 3′ and/or 5′ end of a tagRNA. In some embodiments, a stabilization motif is present at the 3′ end of a tagRNA. Exemplary stabilization motifs include, but are not limited to, recruiting motifs, RNA hairpins, pseudoknot sequences, and/or PP7 motifs (e.g., a PP7 RNA hairpin sequence). In some embodiments, a stagRNA is a tagRNA that comprises a PP7 RNA hairpin sequence. In some embodiments, a CRISPR-Cas effector protein (e.g., a Type II or Type V CRISPR-Cas effector protein), a reverse transcriptase, and an extended guide nucleic acid can form a complex or are comprised in a complex.

[0080] In some embodiments, an extended guide nucleic acid comprises an extended portion that includes a primer binding site and a reverse transcriptase template, wherein the reverse transcriptase template comprises the modification (e.g., edit) to be incorporated into a target nucleic acid. In some embodiments, an extended guide nucleic acid comprises, at its 3′ end, a primer binding site and a modification (e.g., an edit) to be incorporated into the target nucleic acid (e.g., a reverse transcriptase template). In some embodiments, an extended guide nucleic acid comprises: (1) a sequence that interacts (e.g., recruits and/or binds) with a CRISPR-Cas effector protein (e.g., a CRISPR-Cas nuclease), (2) a spacer having substantial complementary to a first site on a target nucleic acid (e.g., a CRISPR RNA (crRNA) (a first crRNA) and/or tracrRNA±crRNA (sgRNA)), and (3) a nucleic acid encoded repair template (e.g., an RNA encoded repair template) comprising a primer binding site and an RNA template (e.g., that encodes the modification to be incorporated into the target nucleic acid). In some embodiments, an extended guide nucleic acid (e.g., an extended guide RNA) may comprise, 5′-3′, a spacer sequence, a repeat sequence, and an extended portion, the extended portion comprising, 5′ to 3′, a reverse transcriptase template and a primer binding site. In some embodiments, an extended guide nucleic acid may comprise, 5′-3′, a spacer sequence, a repeat sequence and an extended portion, the extended portion comprising, 5′ to 3′, a primer binding site and a reverse transcriptase template. In some embodiments, an extended guide nucleic acid may comprise, 5′-3′, an extended portion, a spacer sequence, and a repeat sequence, wherein the extended portion comprises, 5′ to 3′, a reverse transcriptase template and a primer binding site. In some embodiments, an extended guide nucleic acid may comprise, 5′-3′, an extended portion, a spacer sequence, and a repeat sequence, wherein the extended portion comprises, 5′ to 3′, a primer binding site and a reverse transcriptase template.

[0081] According to some embodiments, an extended guide nucleic acid (e.g., a pegRNA) may have a structure and/or be designed as described in Anzalone et al., Nature, 2019 December; 576(7785): 149-157. In some embodiments, an extended guide nucleic acid comprises a primer binding site (PBS) optionally having a sequence of 1, 2, 3, 4, or 5 to 6, 7, 8, 9, 10, 11, 12, 13, 14, or 15 nucleotides and a reverse transcriptase template (RT template) sequence optionally having a sequence of 65 nucleotides or more. In some embodiments, a PBS of an extended guide nucleic acid has a sequence of less than 15 nucleotides and has a sequence of 1, 2, 3, 4, 5, 6, 7, 8, 9, 10, 11, 12, 13, or 14 nucleotides (e.g., a sequence of 5 or 6 nucleotides in length). The RT template sequence may be after the PBS sequence in the 5′ to 3′ direction. In some embodiments, the RT template sequence of the extended guide nucleic acid has a length of greater than 65 nucleotides and may comprise about 50 or more nucleotides of heterology relative to the target site (e.g., target nucleic acid), followed by about 15 or more nucleotides of homology relative to the target site. In some embodiments, the RT template sequence of the extended guide nucleic acid is after the PBS sequence and the RT template sequence has a length of greater than 65 nucleotides with the sequence including more than 50nucleotides of heterology relative to the target site, followed by more than 15 nucleotides of homology relative to the target site. Accordingly, in some embodiments, when the extended guide nucleic acid is reverse transcribed, the resulting newly transcribed sequence may hybridize and/or is configured to hybridize with the unnicked strand of the target site, which may thereby create a heteroduplex DNA with a large insertion into the newly synthesized strand. Upon repair of this mismatched DNA, the resultant repaired DNA may contain a large insertion (e.g., greater than 50 nucleotides) of DNA sequence. In some embodiments, the method may provide a large deletion (e.g., greater than 50 nucleotides) of DNA sequence. In some embodiments, the PBS and the 15 or more nucleotides of homology to the target site may comprise homology arms, which may serve to insert the heterology into the target site optionally using homology directed repair. The inserted DNA may correspond to any functional sequence of DNA such as, but not limited to: a functional transgene; a fragment of DNA that is inserted into a gene in a way that, when the gene is transcribed, would produce a hairpin RNA that is sufficient to silence homologous genes through RNAi; and/or one or more functional site-specific recombination sites, e.g. lox, frt, which could then be used in subsequent Cre or Flp mediated site-specific recombination processes. In some embodiments, an extended guide nucleic acid may be too large to produce using a PolIII promoter in vivo. In some embodiments, an extended guide nucleic acid may be operatively associated with and/or produced using a PolII promoter. In some embodiments, a DNA binding polypeptide (e.g., a DNA binding domain) and/or DNA endonuclease may have a structure and/or be designed as described in Anzalone et al., Nature, 2019 December; 576(7785): 149-157. In some embodiments, a DNA binding domain and/or DNA endonuclease is a CRISPR Cas polypeptide such as a Cas9 nickase, a nicking variant of another CRISPR Cas polypeptide, or Cas12a.

[0082] In some embodiments, two extended guide nucleic acids (e.g., pegRNAs) may be used (e.g., an editing system may comprise two extended guide nucleic acids). One or both of the two extended guide nucleic acids may have a structure and/or be designed as described in Anzalone et al., Nature, 2019 December; 576(7785): 149-157. The two extended guide nucleic acids may comprise a primer binding site (PBS) optionally having a sequence of 1, 2, 3, 4, or 5 to 6, 7, 8, 9, 10, 11, 12, 13, 14, or 15 nucleotides and a reverse transcriptase template (RT template) sequence optionally having a sequence of 50 nucleotides or more. The RT template sequences of the two extended guide nucleic acids may be complementary to each other and as such the polynucleotides that are respectively reverse transcribed from each the RT templates will be complementary to each other and will be able to hybridize with each other. This may allow for the intermediates that are produced by this system and/or method to join together two sections of DNA that are otherwise separated by more than 50 nucleotides, e.g., within a chromosome, or that are positioned on two separate pieces of DNA, e.g., on two different chromosomes. After repair of the intermediates, the resultant products may produce, depending on the design of the RT template, large deletions, large inversions, or inter-chromosomal recombinations. Since all of these products are produced by homology directed repair, the products may be predictably precise and/or reproducible. In some embodiments, a DNA binding polypeptide (e.g., a DNA binding domain) and/or DNA endonuclease may have a structure and/or be designed as described in Anzalone et al., Nature, 2019 December; 576(7785): 149-157. In some embodiment, a DNA binding polypeptide and/or DNA endonuclease is a CRISPR Cas polypeptide such as a Cas9 nickase, a similar nicking variant of another CRISPR Cas polypeptide, or Cas12a. In some embodiments, a DNA binding polypeptide and/or DNA endonuclease is a Cas9 nuclease, a similar nuclease from another CRISPR Cas polypeptide, or Cas12a. Using a nuclease (rather than a nickase) may facilitate the intra-or interchromosomal recombination processes through single-strand annealing of the more than 50 nucleotide 3′ overhangs that would be produced at each of the two target sites corresponding to the two pegRNA target nucleic acids. In some embodiments, an editing system comprises one extended guide nucleic acid and a guide nucleic acid that is devoid of a reverse transcriptase template and/or primer binding site.

[0083] An extended guide nucleic acid may comprise a CRISPR nucleic acid (e.g., CRISPR RNA, CRISPR DNA, crRNA, crDNA) and/or a CRISPR nucleic acid and a tracr nucleic acid; and (b) an extended portion comprising a primer binding site and a reverse transcriptase template (RT template), wherein the RT template encodes a modification to be incorporated into the target nucleic acid. The CRISPR nucleic acid may be a Type II or Type V CRISPR nucleic acid and/or the tracr nucleic acid may be any tracr corresponding to the appropriate Type II or Type V CRISPR nucleic acid. In some embodiments, an extended guide nucleic acid comprises: (i) a Type V CRISPR nucleic acid or a Type II CRISPR nucleic acid (e.g., a Type II or Type V CRISPR RNA, Type II or Type V CRISPR DNA, Type II or Type V crRNA, or Type II or Type V crDNA) and/or a CRISPR nucleic acid and a tracr nucleic acid (e.g., a Type II or Type V tracrRNA, Type II or Type V tracrDNA); and (ii) an extended portion comprising a primer binding site and a reverse transcriptase template (RT template), wherein the Type V CRISPR nucleic acid or Type II CRISPR nucleic acid comprises a spacer that binds to a first strand (e.g., the target strand) of a target nucleic acid (e.g., the spacer is complementary to a portion of consecutive nucleotides in the first strand of the target nucleic acid) and the primer binding site binds to the first strand (e.g., target strand). In some embodiments, the extended portion can be fused to either the 5′ end or 3′ end of the CRISPR nucleic acid (e.g., from 5′ to 3′: repeat-spacer-extended portion or extended portion-repeat-spacer) and/or to the 5′ or 3′ end of the tracr nucleic acid. In some embodiments, the extended portion of an extended guide nucleic acid comprises, 5′ to 3′, an RT template (RTT) and a primer binding site (PBS) (e.g., 5′-crRNA-spacer-RTT (edit encoded)-PBS-3′) or comprises 5′ to 3′ a PBS and RTT, depending on the location of the extended portion relative to the CRISPR nucleic acid of the extended guide nucleic acid (e.g., 5′-crRNA-spacer-PBS-RTT (edit encoded)-3′). For example, in some embodiments, an extended portion of the extended guide nucleic acid may comprise, 5′ to 3′, an RT template and a primer binding site (when the extended guide is linked to the 3′ end of the CRISPR nucleic acid). In some embodiments, an extended portion of the extended guide may comprise, 5′ to 3′, a primer binding site and an RT template (when the extended guide is linked to the 5′ end of the CRISPR nucleic acid).

[0084] In some embodiments, a target nucleic acid is double stranded and comprises a first strand and a second strand and a primer binding site of an extended guide nucleic acid binds to the second strand (e.g., the non-target, top strand) of the target nucleic acid. In some embodiments, a target nucleic acid is double stranded and comprises a first strand and a second strand and a primer binding site of an extended guide nucleic acid binds to the first strand (e.g., binds to the target strand, optionally the same strand to which a CRISPR-Cas effector protein is recruited, bottom strand) of the target nucleic acid. In some embodiments, a target nucleic acid is double stranded and comprises a first strand and a second strand and the primer binding site of an extended guide nucleic acid binds to the second strand (e.g., the non-target strand, optionally the opposite strand from that to which the CRISPR-Cas effector protein is recruited) of the target nucleic acid. In some embodiments, a reverse transcriptase (RT) may add to the target strand of a target nucleic acid (e.g., the strand to which the spacer of the CRISPR nucleic acid of the extended guide nucleic acid is complementary and to which the CRISPR-Cas effector protein is recruited). In some embodiments, the reverse transcriptase (RT) adds to the non-target strand of a target nucleic acid (e.g., the strand that is complementary to the strand to which the spacer of the CRISPR nucleic acid is complementary and to which the CRISPR-Cas effector protein is recruited). Example methods and editing systems are described in International Patent Publication No. WO 2021/092130, International Patent Publication No. WO 2022/098993, and U.S. Patent Application Publication Nos. 2021/0147862, 2021/0130835, 2021/0147862, and 2022/0145334, each of which are incorporated herein by reference in their entirety.

[0085] The RT template of an extended guide nucleic acid may encode one or more modification(s) (e.g., edit(s)) to be incorporated into a target nucleic acid. The one or more modification(s) may be located in any position within an RT template (e.g., where the position location may be relative to the position of a protospacer adjacent motif (PAM) of the target nucleic acid). In some embodiments, an RT template has a modification at one or more positions from −1 to 23 (e.g., −1, 1, 2, 3, 4, 5, 6, 7, 8, 9, 10, 11, 12, 13, 14, 15, 16, 17, 18, 19, 20, 21, 22, or 23) relative to the position of a protospacer adjacent motif (PAM) (e.g., TTTG) in a target nucleic acid. In some embodiments, an RT template may comprise a modification located at nucleotide position −1, 1, 2, 3, 4, 5, 6, 7, 8, 9, 10, 11, 12, 13, 14, 15, 16, 17, 18, 19, 20, 21, 22 or 23. In some embodiments, an RT template may comprise a modification located at nucleotide position 4 to nucleotide position 17 (e.g., position 4, 5, 6, 7, 8, 9, 10, 11, 12, 13, 14, 15, 16, or 17) of the RT template relative to the position of a PAM of a target nucleic acid. In some embodiments, an RT template may comprise a modification located at nucleotide position 10 to nucleotide position 17 (e.g., position 10, 11, 12, 13, 14, 15, 16, or 17) of the RT template relative to the position of a PAM of a target nucleic acid. In some embodiments, an RT template may comprise a modification located at nucleotide position 12 to nucleotide position 15 (e.g., position 12, 13, 14, or 15) of the RT template relative to the position of a PAM of a target nucleic acid.

[0086] In some embodiments, an extended portion of an extended guide nucleic acid may comprise, 5′ to 3′, an RT template and a primer binding site (e.g., when the extended portion is linked to the 3′ end of a CRISPR nucleic acid). In some embodiments, an extended portion of an extended guide nucleic acid may comprise, 5′ to 3′, a primer binding site and an RT template (RTT) (e.g., when the extended portion is linked to the 5′ end of the CRISPR nucleic acid). In some embodiments, an RT template may have a length of about 1 nucleotide to about 100 nucleotides (e.g., about 1, 2, 3, 4, 5, 6, 7, 8, 9, 10, 11, 12, 13, 14, 15, 16, 17, 18, 19, 20, 21, 22, 23, 24, 25, 26, 27, 28, 29, 30, 31, 32, 33, 34, 35, 36, 37, 38, 39, 40, 41, 42, 43, 44, 45, 46, 47, 48, 49, 50, 51, 52, 53, 54, 55, 56, 57, 58, 59, 60, 61, 62, 63, 64, 65, 66, 67, 68, 69, 70, 71, 72, 73, 74, 75, 76, 77, 78, 79, 80, 81, 82, 83, 84, 85, 86, 87, 88, 89, 90, 91, 92, 93, 94, 95, 96, 97, 98, 99, 100 or more nucleotides, and any range or value therein), e.g., about 1 nucleotide to about 10 nucleotides, about 1 nucleotide to about 15 nucleotides, about 1 nucleotide to about 20 nucleotides, about 1 nucleotide to about 25 nucleotides, about 1 nucleotide to about 30 nucleotides, about 1 nucleotide to about 35, 36, 37, 38, 39 or 40 nucleotides, about 1 nucleotide to about 50 nucleotides, about 5 nucleotides to about 15 nucleotides, about 5 nucleotides to about 20 nucleotides, about 5 nucleotides to about 25 nucleotides, about 5 nucleotides to about 30 nucleotides, about 5 nucleotides to about 35, 36, 37, 38, 39 or 40 nucleotides, about 5 nucleotides to about 50 nucleotides, about 8 nucleotides to about 15 nucleotides, about 8 nucleotide to about 20 nucleotides, about 8 nucleotide to about 25 nucleotides, about 8 nucleotide to about 30 nucleotides, about 8 nucleotide to about 35, 36, 37, 38, 39 or 40 nucleotides, about 8 nucleotide to about 50 nucleotides in length, about 8 nucleotides to about 100 nucleotides, about 10 nucleotide to about 15 nucleotides, about 10 nucleotide to about 20 nucleotides, about 10 nucleotide to about 25 nucleotides, about 10 nucleotide to about 30 nucleotides, about 10 nucleotide to about 36 nucleotides, about 10 nucleotide to about 40 nucleotides, about 10 nucleotide to about 50 nucleotides, about 10 nucleotides to about 100 nucleotides in length and any range or value therein. In some embodiments, the length of an RT template may be at least 8 nucleotides, optionally about 8 nucleotides to about 100 nucleotides. In some embodiments, the length of an RT template is 36, 37, 38, 39 or 40 nucleotides or less (e.g., about 1, 2, 3, 4, 5, 6, 7, 8, 9, 10, 11, 12, 13, 14, 15, 16, 17, 18, 19, 20, 21, 22, 23, 24, 25, 26, 27, 28, 29, 30, 31, 32, 33, 34, 35, 36, 37, 38, 39, or 40 nucleotides in length, or any value or range therein (e.g., about 1, 2, 3, 4, 5, 6, 7, 8, 9, 10, 11, 12, 13, 14, or 15 nucleotides in length to about 16, 17, 18, 19, 20, 21, 22, 23, 24, 25, 26, 27, 28, 29, 30, 31, 32, 33, 34, 35, 36, 37, 38, 39, or 40 nucleotides in length). In some embodiments, the length of an RT template may be at least 30 nucleotides, optionally about 30, 31, 32, 33, 34, 35, 36, 37, 38, 39, or 40 nucleotides in length to about to about 41, 42, 43, 44, 45, 46, 47, 48, 49, 50, 51, 52, 53, 54, 55, 56, 57, 58, 59, 60, 61, 62, 63, 64, 65, 66, 67, 68, 69, 70, 71, 72, 73, 74, 75, 76, 77, 78, 79, or 80 nucleotides in length, or any range or value therein. In some embodiments, the length of an RT template may be about 36, 40, 44, 47, 50, 52, 55, 63, 72 or 74 nucleotides. Within the length of the RTT one or more modification(s) may be present. The one or more modification(s) may be located anywhere within the RTT, wherein the position of the modification may be described relative to the position of a protospacer adjacent motif (PAM) of a target nucleic acid. In some embodiments, an RT template may comprise a modification located at nucleotide position −1, 1, 2, 3, 4, 5, 6, 7, 8, 9, 10, 11, 12, 13, 14, 15, 16, 17, 18, 19, 20, 21, 22 or 23. In some embodiments, an RT template may comprise a modification located at nucleotide position 4 to nucleotide position 17 (e.g., position 4, 5, 6, 7, 8, 9, 10, 11, 12, 13, 14, 15, 16, or 17) of the RT template relative to the position of a protospacer adjacent motif (PAM) of a target nucleic acid. In some embodiments, an RT template may comprise a modification located at nucleotide position 10 to nucleotide position 17 (e.g., position 10, 11, 12, 13, 14, 15, 16, or 17) of the RT template relative to the position of a protospacer adjacent motif (PAM) of a target nucleic acid. In some embodiments, an RT template may comprise a modification located at nucleotide position 12 to nucleotide position 15 (e.g., position 12, 13, 14, or 15) of the RT template relative to the position of a protospacer adjacent motif (PAM) of a target nucleic acid.

[0087] As used herein, a “primer binding site” (PBS) of an extended portion of an extended guide nucleic acid (e.g., a tagRNA) refers to a sequence of consecutive nucleotides that can bind to a region or “primer” on a target nucleic acid, e.g., is complementary to the target nucleic acid primer. As an example, a CRISPR Cas effector protein (e.g., a Type II or Type V, e.g., Cas 9 or Cas12a) may nick/cut the DNA and the 3′ end of the cut DNA acts as a primer for the PBS portion of the extended guide nucleic acid. The PBS may be complementary to the 3′ end of a strand of the target nucleic acid and may bind and/or may be configured to bind to either the target strand or non-target strand. A primer binding site can be fully complementary to the primer or it may be substantially complementary (e.g., at least 70% complementary (e.g., 70% or about 71%, 72%, 73%, 74%, 75%, 76%, 77%, 78%, 79%, 80%, 81%, 82%, 83%, 84%, 85%, 86%, 87%, 88%, 89%, 90%, 91%, 92%, 93%, 94%, 95%, 96%, 97%, 98%, 99%, 99.5%, 99.6%, 99.7%, 99.8%, 99.9% or more)) to the primer of a target nucleic acid. In some embodiments, the length of a primer binding site of an extended portion may be about 1 nucleotide to about 100 nucleotides in length (e.g., about 1, 2, 3, 4, 5, 6, 7, 8, 9, 10, 11, 12, 13, 14, 15, 16, 17, 18, 19, 20, 21, 22, 23, 24, 25, 26, 27, 28, 29, 30, 31, 32, 33, 34, 35, 36, 37, 38, 39, 40, 41, 42, 43, 44, 45, 46, 47, 48, 49, 50, 51, 52, 53, 54, 55, 56, 57, 58, 59, 60, 61, 62, 63, 64, 65, 66, 67, 68, 69, 70, 71, 72, 73, 74, 75, 76, 77, 78, 79, 80, 81, 82, 83, 84, 85, 86, 87, 88, 89, 90, 91, 92, 93, 94, 95, 96, 97, 98, 99, 100 or more nucleotides, or any value or range therein), or about 4 nucleotide to about 85 nucleotides, about 10 nucleotide to about 80 nucleotides, about 20 nucleotide to about 80 nucleotides, about 25 nucleotides to about 80 nucleotides about 30 nucleotide to about 80 nucleotides, about 40 nucleotide to about 80 nucleotides, about 45 nucleotide to about 80 nucleotides, about 45 nucleotide to about 75 nucleotides, or about 45 nucleotide to about 60 nucleotides, or any range or value therein. In some embodiments, the length of a PBS may be at least 30 nucleotides, optionally about 30, 31, 32, 33, 34, 35, 36, 37, 38, 39, or 40 nucleotides to about 41, 42, 43, 44, 45, 46, 47, 48, 49, 50, 51, 52, 53, 54, 55, 56, 57, 58, 59, 60, 61, 62, 63, 64, 65, 66, 67, 68, 69, 70, 71, 72, 73, 74, 75, 76, 77, 78, 79, or 80 nucleotides in length, or any range or value therein. In some embodiments, the length of a PBS may be about 8, 16, 24, 32, 40, 48, 56, 64, 72, or 80 nucleotides.

[0088] In some embodiments, an RTT may have a length of about 35 nucleotides to about 75 nucleotides and a PBS may have a length of about 30 nucleotides to about 80 nucleotides, optionally wherein the PBS may comprise a length of about 8, 16, 24, 32, 40, 48, 56, 64, 72, or 80 nucleotides and the RTT may comprise a length of about 36, 40, 44, 47, 50, 52, 55, 63, 72 or 74 nucleotides, or any combination thereof of the RTT length and/or PBS length.

[0089] In some embodiments, an extended portion of an extended guide nucleic acid may be fused to either the 5′ end or 3′ end of a Type II or a Type V CRISPR nucleic acid (e.g., 5′ to 3′: repeat-spacer-extended portion, or extended portion-repeat-spacer) and/or to the 5′ or 3′ end of the tracr nucleic acid. In some embodiments, when an extended portion is located 5′ of the crRNA, a Type V CRISPR-Cas effector protein is modified to reduce (or eliminate) self-processing RNAse activity.

[0090] In some embodiments, the extended portion of an extended guide nucleic acid may be linked to the Type II or Type V CRISPR nucleic acid and/or the Type II or Type V tracrRNA via a linker. In some embodiments, a linker have a length of about 1 to about 100 nucleotides or more (e.g., about 1, 2, 3, 4, 5, 6, 7, 8, 9, 10, 11, 12, 13, 14, 15, 16, 17, 18, 19, 20, 21, 22, 23, 24, 25, 26, 27, 28, 29, 30, 31, 32, 33, 34, 35, 36, 37, 38, 39, 40, 41, 42, 43, 44, 45, 46, 47, 48, 49, 50, 51, 52, 53, 54, 55, 56, 57, 58, 59, 60, 61, 62, 63, 64, 65, 66, 67, 68, 69, 70, 71, 72, 73, 74, 75, 76, 77, 78, 79, 80, 81, 82, 83, 84, 85, 86, 87, 88, 89, 90, 91, 92, 93, 94, 95, 96, 97, 98, 99, 100 or more nucleotides in length, and any range therein (e.g., about 2 to about 40, about 2 to about 50, about 2 to about 60, about 4 to about 40, about 4 to about 50, about 4 to about 60, about 5 to about 40, about 5 to about 50, about 5 to about 60, about 9 to about 40, about 9 to about 50, about 9 to about 60, about 10 to about 40, about 10 to about 50, about 10 to about 60, about 40 to about 100, about 50 to about 100, or about 2, 3, 4, 5, 6, 7, 8, 9, 10, 11, 12, 13, 14, 15, 16, 17, 18, 19, 20, 21, 22, 23, 24, 25 nucleotides to about 26, 27, 28, 29, 30, 31, 32, 33, 34, 35, 36, 37, 38, 39, 40, 41, 42, 43, 44, 45, 46, 47, 48, 49, 50, 51, 52, 53, 54, 55, 56, 57, 58, 59, 60, 61, 62, 63, 64, 65, 66, 67, 68, 69, 70, 71, 72, 73, 74, 75, 76, 77, 78, 79, 80, 81, 82, 83, 84, 85, 86, 87, 88, 89, 90, 91, 92, 93, 94, 95, 96, 97, 98, 99, 100 or more nucleotides in length (e.g., about 105, 110, 115, 120, 130, 140 150 or more nucleotides in length).

[0091] A guide nucleic acid and/or an extended guide nucleic acid may comprise one or more recruiting motifs as described herein, which may be linked to the 5′ end and/or the 3′ end of the guide nucleic acid and/or it may be inserted into the guide nucleic acid (e.g., within a hairpin loop of the guide nucleic acid). In some embodiments, an extended guide nucleic acid may be linked to an RNA recruiting motif. An extended guide nucleic acid and/or guide nucleic acid may be linked to one or to two or more RNA recruiting motifs (e.g., 1, 2, 3, 4, 5, 6, 7, 8, 9, 10 or more motifs; e.g., at least 10 to about 25 motifs), optionally wherein the two or more RNA recruiting motifs may be the same RNA recruiting motif or different RNA recruiting motifs. In some embodiments, an RNA recruiting motif may be located on the 3′ end of the extended portion of an extended guide nucleic acid (e.g., 5′-3′, repeat-spacer-extended portion (RT template-primer binding site)-RNA recruiting motif). In some embodiments, an RNA recruiting motif may be embedded in the extended portion of an extended guide nucleic acid.

[0092] In some embodiments, an editing system comprises an extended guide nucleic acid that is linked to an RNA recruiting motif and a reverse transcriptase that is a reverse transcriptase fusion protein, wherein the reverse transcriptase fusion protein comprises a reverse transcriptase polypeptide fused to an affinity polypeptide that binds to the RNA recruiting motif, wherein the extended guide nucleic acid binds to a target nucleic acid and the RNA recruiting motif binds to the affinity polypeptide, thereby recruiting the reverse transcriptase fusion protein to the extended guide nucleic acid and contacting the target nucleic acid with the reverse transcriptase. In some embodiments, two or more reverse transcriptase fusion proteins may be recruited to an extended guide nucleic acid, thereby contacting the target nucleic acid with two or more reverse transcriptase fusion proteins.

[0093] The terms “transgene” or “transgenic” as used herein refer to at least one nucleic acid sequence that is taken from the genome of one organism or produced synthetically, and which is then introduced into a host cell (e.g., a plant cell) or organism or tissue of interest and which is subsequently integrated into the host's genome by means of “stable” transformation or transfection approaches. In contrast, the term “transient” transformation or transfection or introduction refers to a way of introducing molecular tools including at least one nucleic acid (DNA, RNA, single-stranded or double-stranded or a mixture thereof) and/or at least one amino acid sequence, optionally comprising suitable chemical or biological agents, to achieve a transfer into at least one compartment of interest of a cell, including, but not restricted to, the cytoplasm, an organelle, including the nucleus, a mitochondrion, a vacuole, a chloroplast, or into a membrane, resulting in transcription and/or translation and/or association and/or activity of the at least one molecule introduced without achieving a stable integration or incorporation into the genome and thus without inheritance of the respective at least one molecule introduced into the genome of a cell. The term “transgene-free” refers to a condition in which a transgene is not present or found in the genome of a host cell or tissue or organism of interest.

[0094] In some embodiments, a polynucleotide and/or a nucleic acid construct of the invention can be an “expression cassette” or can be comprised within an expression cassette. As used herein, “expression cassette” means a recombinant nucleic acid molecule comprising, for example, a nucleic acid construct of the invention (e.g., a polynucleotide encoding a polypeptide (e.g., an engineered protein) of the present invention, a polynucleotide encoding a nuclease, a polynucleotide encoding a deaminase, a polynucleotide encoding a deaminase fusion protein, a polynucleotide encoding a reverse transcriptase, a polynucleotide encoding a reverse transcriptase fusion protein, a polynucleotide encoding a peptide tag, a polynucleotide encoding an affinity polypeptide, a polynucleotide encoding a glycosylase, and/or a polynucleotide comprising a guide nucleic acid), wherein the nucleic acid construct is operably associated with at least a control sequence (e.g., a promoter). Thus, some embodiments of the invention provide expression cassettes designed to express, for example, a nucleic acid construct of the invention. When an expression cassette comprises more than one polynucleotide, the polynucleotides may be operably linked to a single promoter that drives expression of all of the polynucleotides or the polynucleotides may be operably linked to one or more separate promoters (e.g., three polynucleotides may be driven by one, two or three promoters in any combination). Thus, for example, a polynucleotide encoding a protein of the present invention and a polynucleotide comprising a guide nucleic acid comprised in an expression cassette may each be operably associated with a single promoter or one or more of the polynucleotide(s) may be operably associated with separate promoters (e.g., two or three promoters) in any combination, which may be the same or different from each other.

[0095] In some embodiments, an expression cassette comprising the polynucleotides/nucleic acid constructs of the invention may be optimized for expression in an organism (e.g., an animal, a plant, a bacterium and the like).

[0096] An expression cassette comprising a nucleic acid construct of the invention may be chimeric, meaning that at least one of its components is heterologous with respect to at least one of its other components (e.g., a promoter from the host organism operably linked to a polynucleotide of interest to be expressed in the host organism, wherein the polynucleotide of interest is from a different organism than the host or is not normally found in association with that promoter). An expression cassette may also be one that is naturally occurring but has been obtained in a recombinant form useful for heterologous expression.

[0097] An expression cassette can optionally include a transcriptional and/or translational termination region (i.e., termination region) and/or an enhancer region that is functional in the selected host cell. A variety of transcriptional terminators and enhancers are known in the art and are available for use in expression cassettes. Transcriptional terminators are responsible for the termination of transcription and correct mRNA polyadenylation. A termination region and/or the enhancer region may be native to the transcriptional initiation region, may be native to a gene encoding a CRISPR-Cas effector protein, or a gene encoding a protein of the present invention, may be native to a host cell, or may be native to another source (e.g., foreign or heterologous to the promoter, to a gene encoding the CRISPR-Cas effector protein, to a host cell, or any combination thereof).

[0098] An expression cassette of the invention also can include a polynucleotide encoding a selectable marker, which can be used to select a transformed host cell. As used herein, “selectable marker” means a polynucleotide sequence that when expressed imparts a distinct phenotype to the host cell expressing the marker and thus allows such transformed cells to be distinguished from those that do not have the marker. Such a polynucleotide sequence may encode either a selectable or screenable marker, depending on whether the marker confers a trait that can be selected for by chemical means, such as by using a selective agent (e.g., an antibiotic and the like), or on whether the marker is simply a trait that one can identify through observation or testing, such as by screening (e.g., fluorescence). Many examples of suitable selectable markers are known in the art and can be used in the expression cassettes described herein.

[0099] The expression cassettes, the nucleic acid molecules/constructs and polynucleotide sequences described herein can be used in connection with vectors. The term “vector” refers to a composition for transferring, delivering or introducing a nucleic acid (or nucleic acids) into a cell. A vector may comprise a nucleic acid construct comprising one or more nucleotide sequence(s) to be transferred, delivered or introduced into a cell. Vectors for use in transformation of host organisms are well known in the art. Non-limiting examples of general classes of vectors include viral vectors (e.g., Adeno-associated virus (AAV) vectors), plasmid vectors, phage vectors, phagemid vectors, cosmid vectors, fosmid vectors, bacteriophages, artificial chromosomes, minicircles, or Agrobacterium binary vectors in double or single stranded linear or circular form which may or may not be self transmissible or mobilizable. In some embodiments, a viral vector can include, but is not limited, to a retroviral, lentiviral, adenoviral, adeno-associated, or herpes simplex viral vector. A vector as defined herein can transform a prokaryotic or eukaryotic host either by integration into the cellular genome or exist extrachromosomally (e.g., autonomous replicating plasmid with an origin of replication). Additionally, included are shuttle vectors by which is meant a DNA vehicle capable, naturally or by design, of replication in two different host organisms, which may be selected from actinomycetes and related species, bacteria and eukaryotic (e.g., higher plant, mammalian, yeast or fungal cells). In some embodiments, the nucleic acid in the vector is under the control of, and operably linked to, an appropriate promoter or other regulatory elements for transcription in a host cell. The vector may be a bi-functional expression vector which functions in multiple hosts. In the case of genomic DNA, this may contain its own promoter and/or other regulatory elements and in the case of cDNA this may be under the control of an appropriate promoter and/or other regulatory elements for expression in the host cell. Accordingly, a nucleic acid construct of this invention and/or expression cassettes comprising the same may be comprised in vectors as described herein and as known in the art.

[0100] As used herein, “contact,” “contacting,” “contacted,” and grammatical variations thereof, refer to placing the components of a desired reaction together under conditions suitable for carrying out the desired reaction (e.g., transformation, transcriptional control, genome editing, nicking, and/or cleavage). Thus, for example, a target nucleic acid may be contacted with a nucleic acid construct of the invention encoding, for example, a nucleic acid binding polypeptide (e.g., a DNA binding domain such as a sequence-specific DNA binding protein (e.g., a polynucleotide-guided endonuclease, a CRISPR-Cas effector protein (e.g., a CRISPR-Cas endonuclease), a zinc finger nuclease, a transcription activator-like effector nuclease (TALEN) and/or an Argonaute protein)), a guide nucleic acid, optionally a polynucleotide encoding a deaminase, and optionally a polynucleotide encoding a reverse transcriptase, under conditions whereby the nucleic acid binding polypeptide (e.g., a CRISPR-Cas effector protein and/or a protein of the present invention) is expressed, and the nucleic acid binding polypeptide forms a complex with the guide nucleic acid, the complex hybridizes to the target nucleic acid, thereby modifying the target nucleic acid. In some embodiments, a protein of the present invention and/or a nucleic acid binding polypeptide localize at the target nucleic acid, optionally through covalent and/or non-covalent interactions. Methods for recruiting a protein of the present invention may be used that take advantage of other protein-protein interactions, RNA-protein interactions, and/or chemical interactions.

[0101] In some embodiments, a target nucleic acid may be contacted with a nucleic acid construct of the invention encoding a protein of the present invention and a guide nucleic acid, under conditions whereby the protein is expressed, or a target nucleic acid may be contacted with protein of the present invention and a guide nucleic acid. A protein of the present invention may be used as a CRISPR-Cas effector protein. A protein of the present invention and/or a CRISPR-Cas effector protein can form a complex with a guide nucleic acid, and the complex can hybridize to the target nucleic acid. In some embodiments, a protein of the present invention and/or another component is/are recruited to a target nucleic acid. The protein of the present invention may localize at a target nucleic acid, optionally through covalent and/or non-covalent interactions.

[0102] As used herein, “modifying” or “modification” in reference to a target nucleic acid includes editing (e.g., mutating), covalent modification, exchanging/substituting nucleic acids/nucleotide bases, deleting, cleaving, and/or nicking of a target nucleic acid to thereby provide a modified nucleic acid and/or altering transcriptional control of a target nucleic acid to thereby provide a modified nucleic acid. In some embodiments, a modification may include an insertion and/or deletion of any size and/or a single base change (SNP) of any type. In some embodiments, a modification comprises a SNP. In some embodiments, a modification comprises exchanging and/or substituting one or more (e.g., 1, 2, 3, 4, 5, or more) nucleotides. In some embodiments, an insertion or deletion may be about 1 base to about 30,000 bases or more in length (e.g., about 1, 2, 3, 4, 5, 6, 7, 8, 9, 10, 11, 12, 13, 14, 15, 16, 17, 18, 19, 20, 21, 22, 23, 24, 25, 26, 27, 28, 29, 30, 31, 32, 33, 34, 35, 36, 37, 38, 39, 40, 41, 42, 43, 44, 45, 46, 47, 48, 49, 50, 51, 52, 53, 54, 55, 56, 57, 58, 59, 60, 61, 62, 63, 64, 65, 66, 67, 68, 69, 70, 71, 72, 73, 74, 75, 76, 77, 78, 79, 80, 81, 82, 83, 84, 85, 86, 87, 88, 89, 90, 91, 92, 93, 94, 95, 96, 97, 98, 99, 100, 110, 120, 130, 140, 150, 160, 170, 180, 190, 200, 210, 220, 230, 240, 250, 260, 270, 280, 290, 300, 310, 320, 330, 340, 350, 360, 370, 380, 390, 400, 410, 400, 410, 420, 430, 440, 450, 460, 470, 480, 490, 500, 510, 520, 530, 540, 550, 560, 570, 580, 590, 600, 610, 620, 630, 640, 650, 660, 670, 680, 690, 700, 710, 720, 730, 740, 750, 760, 770, 780, 790, 800, 810, 820, 830, 840, 850, 860, 870, 880, 890, 900, 910, 920, 930, 940, 950, 960, 970, 980, 990, 1000, 1100, 1200, 1300, 1400, 1500, 1600, 1700, 1800, 1900, 2000, 2500, 3000, 3500, 4000, 4500, 5000, 5500, 6000, 6500, 7000, 7500, 8000, 8500, 9000, 9500, 10,000, 10,500, 11,000, 11,500, 12,000, 12,500, 13,000, 13,500, 14,000, 14,500, 15,000, 15,500, 16,000, 16,500, 17,000, 17,500, 18,000, 18,500, 19,000, 19,500, 20,000, 20,500, 21,000, 21,500, 22,000, 22,500, 23,000, 23,500, 24,000, 24,500, 25,000, 25,500, 26,000, 26,500, 27,000, 27,500, 28,000, 28,500, 29,000, 29,500, 30,000 bases in length or more, or any value or range therein). Thus, in some embodiments, an insertion or deletion may be about 1, 2, 3, 4, 5, 6, 7, 8, 9, 10, 11, 12, 13, 14, 15, 16, 17, 18, 19, 20, 21, 22, 23, 24, 25, 26, 27, 28, 29, 30, 31, 32, 33, 34, 35, 36, 37, 38, 39, 40, 41, 42, 43, 44, 45, 46, 47, 48, 49, 50, 51, 52, 53, 54, 55, 56, 57, 58, 59, 60, 61, 62, 63, 64, 65, 66, 67, 68, 69, 70, 71, 72, 73, 74, 75, 76, 77, 78, 79, 80, 81, 82, 83, 84, 85, 86, 87, 88, 89, 90, 91, 92, 93, 94, 95, 96, 97, 98, 99, 100, 110, 120, 130, 140, 150, 160, 170, 180, 190, 200, 210, 220, 230, 240, 250, 260, 270, 280, 290, 300 to about 310, 320, 330, 340, 350, 360, 370, 380, 390, 400, 410, 420, 430, 440, 450, 460, 470, 480, 490, 500, 510, 520, 530, 540, 550, 560, 570, 580, 590, 600, 610, 620, 630, 640, 650, 660, 670, 680, 690, 700, 710, 720, 730, 740, 750, 760, 770, 780, 790, 800, 810, 820, 830, 840, 850, 860, 870, 880, 890, 900, 910, 920, 930, 940, 950, 960, 970, 980, 990, 1000 bases in length, or any range or value therein; about 50, 51, 52, 53, 54, 55, 56, 57, 58, 59, 60, 61, 62, 63, 64, 65, 66, 67, 68, 69, 70, 71, 72, 73, 74, 75, 76, 77, 78, 79, 80, 81, 82, 83, 84, 85, 86, 87, 88, 89, 90, 91, 92, 93, 94, 95, 96, 97, 98, 99, 100, 110, 120, 130, 140, 150, 160, 170, 180, 190, 200, 210, 220, 230, 240, 250, 260, 270, 280, 290, 300 bases to about 310, 320, 330, 340, 350, 360, 370, 380, 390, 400, 410, 420, 430, 440, 450, 460, 470, 480, 490, 500, 510, 520, 530, 540, 550, 560, 570, 580, 590, 600, 610, 620, 630, 640, 650, 660, 670, 680, 690, 700, 710, 720, 730, 740, 750, 760, 770, 780, 790, 800, 810, 820, 830, 840, 850, 860, 870, 880, 890, 900, 910, 920, 930, 940, 950, 960, 970, 980, 990, 1000, 1100, 1200, 1300, 1400, 1500, 1600, 1700, 1800, 1900, 2000 bases or more in length, or any value or range therein; about 500, 510, 520, 530, 540, 550, 560, 570, 580, 590, 600, 610, 620, 630, 640, 650, 660, 670, 680, 690, 700, 710, 720, 730, 740, 750, 760, 770, 780, 790, 800, 810, 820, 830, 840, 850, 860, 870, 880, 890, 900, 910, 920, 930, 940, 950, 960, 970, 980, 990, 1000, 1100, 1200, 1300, 1400, 1500, 1600, 1700, 1800, 1900, 2000 bases to about 2500, 3000, 3500, 4000, 4500, 5000, 5500, 6000, 6500, 7000, 7500, 8000, 8500, 9000, 9500, or 10,000 bases or more in length, or any value or range therein; or about 400, 410, 420, 430, 440, 450, 460, 470, 480, 490, 500, 510, 520, 530, 540, 550, 560, 570, 580, 590, 600, 610, 620, 630, 640, 650, 660, 670, 680, 690, or 700 bases to about 710, 720, 730, 740, 750, 760, 770, 780, 790, 800, 810, 820, 830, 840, 850, 860, 870, 880, 890, 900, 910, 920, 930, 940, 950, 960, 970, 980, 990, 1000, 1100, 1200, 1300, 1400, 1500, 1600, 1700, 1800, 1900, 2000, 2500, 3000, 3500, 4000, 4500, or 5000 bases or more in length, or any value or range therein. In some embodiments, an insertion or deletion may be about 1000, 1100, 1200, 1300, 1400, 1500, 1600, 1700, 1800, 1900, 2000, 2500, 3000, 3500, 4000, 4500, 5000, 5500, 6000, 6500, 7000, 7500, 8000, 8500, 9000, 9500, or 10,000 bases to about 10,500, 11,000, 11,500, 12,000, 12,500, 13,000, 13,500, 14,000, 14,500, 15,000, 15,500, 16,000, 16,500, 17,000, 17,500, 18,000, 18,500, 19,000, 19,500, 20,000, 20,500, 21,000, 21,500, 22,000, 22,500, 23,000, 23,500, 24,000, 24,500, 25,000, 25,500, 26,000, 26,500, 27,000, 27,500, 28,000, 28,500, 29,000, 29,500, or 30,000 bases or more in length, or any value or range therein.

[0103] “Recruit,” “recruiting” or “recruitment” as used herein refer to attracting one or more polypeptide(s) or polynucleotide(s) to another polypeptide or polynucleotide (e.g., to a particular location in a genome) using protein-protein interactions, nucleic acid-protein interactions (e.g., RNA-protein interactions), and/or chemical interactions. Protein-protein interactions can include, but are not limited to, peptide tags (epitopes, multimerized epitopes) and corresponding affinity polypeptides, RNA recruiting motifs and corresponding affinity polypeptides, and/or chemical interactions. Example chemical interactions that may be useful with polypeptides and polynucleotides for the purpose of recruitment can include, but are not limited to, rapamycin-inducible dimerization of FRB-FKBP; Biotin-streptavidin interaction; SNAP tag (Hussain et al. Curr Pharm Des. 19(30):5437-42 (2013)); Halo tag (Los et al. ACS Chem Biol. 3(6):373-82 (2008)); CLIP tag (Gautier et al. Chemistry & Biology 15:128-136 (2008)); DmrA-DmrC heterodimer induced by a compound (Tak et al. Nat Methods 14(12):1163-1166 (2017)); and/or bifunctional ligand approaches e.g., chemically induced dimerization (Voß et al. Curr Opin Chemical Biology 28:194-201 (2015)) (e.g. dihyrofolate reductase (DHFR) (Kopyteck et al. Cell Chem Biol 7(5):313-321 (2000)). In some embodiments, a recruiting method and/or system of the present invention uses a protein-protein interaction and/or nucleic acid-protein interaction (e.g., RNA-protein interactions) to attract a polypeptide or polynucleotide to another polypeptide or polynucleotide (e.g., to a particular location in a genome).

[0104] “Introducing,” “introduce,” “introduced” (and grammatical variations thereof) in the context of a polynucleotide of interest or editing system means presenting a nucleotide sequence of interest (e.g., polynucleotide, a nucleic acid construct, and/or a guide nucleic acid) and/or editing system (e.g., a polynucleotide, polypeptide, and/or ribonucleoprotein) to a host organism or cell of said organism (e.g., host cell; e.g., a plant cell) in such a manner that the nucleotide sequence and/or editing system gains access to the interior of a cell. Thus, for example, a nucleic acid construct of the invention encoding a protein of the present invention, a CRISPR-Cas effector protein of the present invention, and/or a guide nucleic acid may be introduced into a cell of an organism, thereby transforming the cell with the protein, CRISPR-Cas effector protein, and/or guide nucleic acid, respectively. In some embodiments, a protein of the present invention and/or a guide nucleic acid may be introduced into a cell of an organism, optionally wherein the protein and guide nucleic acid may be comprised in a complex (e.g., a ribonucleoprotein). In some embodiments, the organism is a eukaryote (e.g., a mammal such as a human).

[0105] The term “transformation” as used herein refers to the introduction of a nucleic acid, polypeptide, and/or ribonucleoprotein (e.g., a heterologous nucleic acid, polypeptide, and/or ribonucleoprotein) into a cell. Transformation of a cell may be stable or transient. Thus, in some embodiments, a host cell or host organism may be stably transformed with a polynucleotide/nucleic acid molecule of the invention. In some embodiments, a host cell or host organism may be transiently transformed with a nucleic acid construct, a polypeptide, and/or a ribonucleoprotein of the invention.

[0106] “Transient transformation” in the context of a polynucleotide, polypeptide, and/or ribonucleoprotein means that a polynucleotide, polypeptide, and/or ribonucleoprotein is introduced into the cell and does not integrate into the genome of the cell.

[0107] By “stably introducing” or “stably introduced” in the context of a polynucleotide introduced into a cell is intended that the introduced polynucleotide is stably incorporated into the genome of the cell, and thus the cell is stably transformed with the polynucleotide.

[0108] “Stable transformation” or “stably transformed” as used herein means that a nucleic acid molecule is introduced into a cell and integrates into the genome of the cell. As such, the integrated nucleic acid molecule is capable of being inherited by the progeny thereof, more particularly, by the progeny of multiple successive generations. “Genome” as used herein includes the nuclear and the plastid genome, and therefore includes integration of the nucleic acid into, for example, the chloroplast or mitochondrial genome. Stable transformation as used herein can also refer to a transgene that is maintained extrachromasomally, for example, as a minichromosome or a plasmid.

[0109] Transient transformation may be detected by, for example, an enzyme-linked immunosorbent assay (ELISA) or Western blot, which can detect the presence of a peptide or polypeptide encoded by one or more transgene introduced into an organism. Stable transformation of a cell can be detected by, for example, a Southern blot hybridization assay of genomic DNA of the cell with nucleic acid sequences which specifically hybridize with a nucleotide sequence of a transgene introduced into an organism (e.g., a mammal, plant, etc.). Stable transformation of a cell can be detected by, for example, a Northern blot hybridization assay of RNA of the cell with nucleic acid sequences which specifically hybridize with a nucleotide sequence of a transgene introduced into a host organism. Stable transformation of a cell can also be detected by, e.g., a polymerase chain reaction (PCR) or other amplification reactions as are well known in the art, employing specific primer sequences that hybridize with target sequence(s) of a transgene, resulting in amplification of the transgene sequence, which can be detected according to standard methods. Transformation can also be detected by direct sequencing and/or hybridization protocols well known in the art.

[0110] Accordingly, in some embodiments, nucleotide sequences, polynucleotides, nucleic acid constructs, and/or expression cassettes of the invention may be expressed transiently and/or they can be stably incorporated into the genome of the host organism. Thus, in some embodiments, a nucleic acid construct of the invention may be transiently introduced into a cell with a guide nucleic acid and as such, no DNA maintained in the cell.

[0111] A nucleic acid construct, polypeptide, and/or ribonucleoprotein of the invention can be introduced into a cell by any method known to those of skill in the art. In some embodiments, transformation methods include, but are not limited to, transformation via bacterial-mediated nucleic acid delivery (e.g., via Agrobacteria), viral-mediated nucleic acid delivery, silicon carbide and/or nucleic acid whisker-mediated nucleic acid delivery, liposome mediated nucleic acid delivery, microinjection, microparticle bombardment, calcium-phosphate-mediated transformation, cyclodextrin-mediated transformation, electroporation, nanoparticle-mediated transformation, sonication, infiltration, PEG-mediated nucleic acid uptake, as well as any other electrical, chemical, physical (mechanical) and/or biological mechanism that results in the introduction of nucleic acid into the cell (e.g., a plant cell or an animal cell), including any combination thereof. In some embodiments of the invention, transformation of a cell comprises nuclear transformation. In some embodiments, transformation of a cell comprises plastid transformation (e.g., chloroplast transformation). In some embodiments, a recombinant nucleic acid construct of the invention can be introduced into a cell via conventional breeding techniques.

[0112] Procedures for transforming both eukaryotic and prokaryotic organisms are well known and routine in the art and are described throughout the literature (See, for example, Jiang et al. 2013. Nat. Biotechnol. 31:233-239; Ran et al. Nature Protocols 8:2281-2308 (2013)). General guides to various plant transformation methods known in the art include Miki et al. (“Procedures for Introducing Foreign DNA into Plants” in Methods in Plant Molecular Biology and Biotechnology, Glick, B. R. and Thompson, J. E., Eds. (CRC Press, Inc., Boca Raton, 1993), pages 67-88) and Rakowoczy-Trojanowska (Cell. Mol. Biol. Lett. 7:849-858 (2002)).

[0113] A nucleotide sequence, polypeptide, and/or ribonucleoprotein therefore can be introduced into a host organism or its cell in any number of ways that are well known in the art. The methods of the invention do not depend on a particular method for introducing one or more nucleotide sequence(s), polypeptide(s), and/or ribonucleoprotein(s) into the organism, only that they gain access to the interior of at least one cell of the organism. Where more than one nucleotide sequence, polypeptide, and/or ribonucleoprotein is to be introduced, they can be assembled as part of a single nucleic acid construct, or as separate nucleic acid constructs, and can be located on the same or different nucleic acid constructs. Accordingly, a nucleotide sequence, polypeptide, and/or ribonucleoprotein can be introduced into the cell of interest in a single transformation event, and/or in separate transformation events, or, alternatively, where relevant, a nucleotide sequence can be incorporated into a plant, for example, as part of a breeding protocol. In some embodiments, the cell is a eukaryotic cell (e.g., a plant cell or a mammalian such as a human cell).

[0114] In some embodiments, a nucleic acid construct of the invention (e.g., a polynucleotide encoding an CRISPR-Cas effector protein, a polynucleotide encoding a protein of the present invention, and/or a guide nucleic acid and/or expression cassettes and/or vectors comprising the same) may be operably linked to at least one regulatory sequence, optionally, wherein the at least one regulatory sequence may be codon optimized for expression in a plant. In some embodiments, the at least one regulatory sequence may be, for example, a promoter, an operon, a terminator, or an enhancer. In some embodiments, the at least one regulatory sequence may be a promoter. In some embodiments, the regulatory sequence may be an intron. In some embodiments, the at least one regulatory sequence may be, for example, a promoter operably associated with an intron or a promoter region comprising an intron. In some embodiments, the at least one regulatory sequence may be, for example a ubiquitin promoter and its associated intron (e.g., Medicago truncatula and/or Zea mays and their associated introns). In some embodiments, the at least one regulatory sequence may be a terminator nucleotide sequence and/or an enhancer nucleotide sequence.

[0115] In some embodiments, a nucleic acid construct of the invention may be operably associated with a promoter region, wherein the promoter region comprises an intron, optionally wherein the promoter region may be a ubiquitin promoter and intron (e.g., a Medicago or a maize ubiquitin promoter and intron, e.g., SEQ ID NO:37 or SEQ ID NO:38). In some embodiments, the nucleic acid construct of the invention that is operably associated with a promoter region comprising an intron may be codon optimized for expression in a plant.

[0116] In some embodiments, a nucleic acid construct of the invention may encode one or more (e.g., 1, 2, 3, 4, or more) polypeptide(s) of interest. The one or more polypeptides of interest may be codon optimized for expression in a eukaryote (e.g., a human or a plant). In some embodiments, a protein of the present invention may comprise one or more (e.g., 1, 2, 3, 4, or more) polypeptide(s) of interest. A polypeptide of interest may be fused (e.g., directly or indirectly) to a protein of the present invention.

[0117] A polypeptide of interest useful with this invention can include, but is not limited to, a polypeptide or protein domain having deaminase activity, nickase activity, recombinase activity, transposase activity, methylase activity, glycosylase (DNA glycosylase) activity, glycosylase inhibitor activity (e.g., uracil-DNA glycosylase inhibitor (UGI)), a reverse transcriptase, a peptide tag (e.g., a GCN4 peptide tag), demethylase activity, transcription activation activity, transcription repression activity, transcription release factor activity, histone modification activity, nuclease activity, single-strand RNA cleavage activity, double-strand RNA cleavage activity, restriction endonuclease activity (e.g., Fok1), nucleic acid binding activity, methyltransferase activity, DNA repair activity, DNA damage activity, dismutase activity, alkylation activity, depurination activity, oxidation activity, pyrimidine dimer forming activity, integrase activity, transposase activity, polymerase activity, ligase activity, helicase activity, a nuclear localization sequence or activity, an affinity polypeptide, a peptide tag, and/or photolyase activity. In some embodiments, the polypeptide of interest is a Fok1 nuclease, or a uracil-DNA glycosylase inhibitor. When encoded in a nucleic acid (polynucleotide, expression cassette, and/or vector) the encoded polypeptide or protein domain may be codon optimized for expression in an organism. In some embodiments, a polypeptide of interest may be linked to a CRISPR-Cas effector protein domain to provide a CRISPR-Cas fusion protein. In some embodiments, a CRISPR-Cas fusion protein that comprises a CRISPR-Cas effector protein domain linked to a peptide tag may also be linked to a polypeptide of interest (e.g., a CRISPR-Cas effector protein domain may be, for example, linked to both a peptide tag (or an affinity polypeptide) and, for example, a polypeptide of interest.

[0118] In some embodiments, an editing system of the present invention comprises a CRISPR-Cas effector protein. In some embodiments, a protein of the present invention is used in a composition, system, and/or method as a CRISPR-Cas effector protein (e.g., a protein of the present invention is substituted for a CRISPR-Cas effector protein and/or is used to perform a function of a CRISPR-Cas effector protein). As used herein, a “CRISPR-Cas effector protein” is a protein or polypeptide that cleaves, cuts, or nicks a nucleic acid; binds a nucleic acid (e.g., a target nucleic acid and/or a guide nucleic acid); and/or that identifies, recognizes, or binds a guide nucleic acid as defined herein. In some embodiments, a CRISPR-Cas effector protein may be an enzyme (e.g., a nuclease, endonuclease, nickase, etc.) and/or may function as an enzyme. In some embodiments, a CRISPR-Cas effector protein refers to a CRISPR-Cas nuclease. In some embodiments, a CRISPR-Cas effector protein comprises nuclease activity and/or nickase activity, comprises a nuclease domain whose nuclease activity and/or nickase activity has been reduced or eliminated, comprises single stranded DNA cleavage activity (ss DNAse activity) or which has ss DNAse activity that has been reduced or eliminated, and/or comprises self-processing RNAse activity or which has self-processing RNAse activity that has been reduced or eliminated. A CRISPR-Cas effector protein may bind to a target nucleic acid. A CRISPR-Cas effector protein may be a Type I, II, III, IV, V, or VI CRISPR-Cas effector protein. In some embodiments, a CRISPR-Cas effector protein may be from a Type I CRISPR-Cas system, a Type II CRISPR-Cas system, a Type III CRISPR-Cas system, a Type IV CRISPR-Cas system, Type V CRISPR-Cas system, or a Type VI CRISPR-Cas system. In some embodiments, a CRISPR-Cas effector protein may be from a Type II CRISPR-Cas system or a Type V CRISPR-Cas system. In some embodiments, a CRISPR-Cas effector protein may be a Type II CRISPR-Cas effector protein, for example, a Cas9 effector protein. In some embodiments, a CRISPR-Cas effector protein may be Type V CRISPR-Cas effector protein, for example, a Cas12 effector protein. In some embodiments, a CRISPR-Cas effector protein may be Cas12a and optionally may have an amino acid sequence of any one of SEQ ID NOs:39-65 and/or a nucleotide sequence of any one of SEQ ID NOs:66-68. In some embodiments, a CRISPR-Cas effector protein may be an active Cas12a and optionally may have an amino acid sequence of SEQ ID NO:49 or 58. In some embodiments, a CRISPR-Cas effector protein may be an inactive (i.e., dead) Cas12a and optionally may have an amino acid sequence of one of SEQ ID NOs:39-41. In some embodiments, a CRISPR-Cas effector protein may be Cas 12b and optionally may have an amino acid sequence of SEQ ID NO:69.

[0119] Exemplary CRISPR-Cas effector proteins include, but are not limited to, a Cas9, C2c1, C2c3, Cas12a (also referred to as Cpf1), Cas12b, Cas12c, Cas12d, Cas12c, Cas13a, Cas13b, Cas13c, Cas13d, Cas1, Cas1B, Cas2, Cas3, Cas3′, Cas3″, Cas4, Cas5, Cas6, Cas7, Cas8, Cas9 (also known as Csn1 and Csx12), Cas10, Csy1, Csy2, Csy3, Cse1, Cse2, Csc1, Csc2, Csa5, Csn2, Csm2, Csm3, Csm4, Csm5, Csm6, Cmr1, Cmr3, Cmr4, Cmr5, Cmr6, Csb1, Csb2, Csb3, Csx17,Csx14, Csx10, Csx16, CsaX, Csx3, Csx1, Csx15, Csf1, Csf2, Csf3, Csf4 (dinG), and/or Csf5nuclease, optionally wherein the CRISPR-Cas effector protein may be a Cas9, Cas12a (Cpf1), Cas12b, Cas12c (C2c3), Cas12d (CasY), Cas12c (CasX), Cas12g, Cas12h, Cas12i, C2c4,C2c5, C2c8, C2c9, C2c10, Cas14a, Cas14b, and/or Cas14c effector protein.

[0120] In some embodiments, a CRISPR-Cas effector protein useful with the invention may comprise a mutation in its nuclease active site and/or nuclease domain (e.g., a RuvC, HNH, e.g., a RuvC site of a Cas12a nuclease domain; e.g., a RuvC site and/or HNH site of a Cas9 nuclease domain). A CRISPR-Cas effector protein having a mutation in its nuclease active site and/or nuclease domain that causes the protein to not have nuclease activity, is commonly referred to as “inactive” or “dead,” e.g., dCas9. In some embodiments, a CRISPR-Cas effector protein having a mutation in its nuclease active site and/or nuclease domain may have impaired activity or reduced activity (e.g., nickase activity) as compared to the same CRISPR-Cas effector protein without the mutation.

[0121] A CRISPR Cas9 effector protein or Cas9 useful with this invention may be any known or later identified Cas9 nuclease. In some embodiments, a Cas9 may be a protein from, for example, Streptococcus spp. (e.g., S. pyogenes, S. thermophilus), Lactobacillus spp., Bifidobacterium spp., Kandleria spp., Leuconostoc spp., Oenococcus spp., Pediococcus spp., Weissella spp., and/or Olsenella spp. In some embodiments, a CRISPR-Cas effector protein may be a Cas9 and optionally may have a nucleotide sequence of any one of SEQ ID NOs:70-84 and/or an amino acid sequence of any one of SEQ ID NOs:85-94.

[0122] In some embodiments, the CRISPR-Cas effector protein may be a Cas9 derived from Streptococcus pyogenes and/or may recognize the PAM sequence motif NGG, NAG, NGA (Mali et al, Science 2013; 339(6121): 823-826). In some embodiments, the CRISPR-Cas effector protein may be a Cas9 derived from Streptococcus thermophiles and/or may recognize the PAM sequence motif NGGNG and/or NNAGAAW (W=A or T) (See, e.g., Horvath et al, Science, 2010; 327(5962): 167-170, and Deveau et al, J Bacteriol 2008; 190(4): 1390-1400). In some embodiments, the CRISPR-Cas effector protein may be a Cas9 derived from Streptococcus mutans and/or may recognize the PAM sequence motif NGG and/or NAAR (R=A or G) (See, e.g., Deveau et al, J BACTERIOL 2008; 190(4): 1390-1400). In some embodiments, the CRISPR-Cas effector protein may be a Cas9 derived from Streptococcus aureus and/or may recognize the PAM sequence motif NNGRR (R=A or G). In some embodiments, the CRISPR-Cas effector protein may be a Cas9 derived from S. aureus and/or may recognize the PAM sequence motif N GRRT (R=A or G). In some embodiments, the CRISPR-Cas effector protein may be a Cas9 derived from S. aureus and/or may recognize the PAM sequence motif N GRRV (R=A or G). In some embodiments, the CRISPR-Cas effector protein may be a Cas9 that is derived from Neisseria meningitidis and/or may recognize the PAM sequence motif N GATT or N GCTT (R=A or G, V=A, G or C) (See, e.g., Hou et ah, PNAS 2013, 1-6). In the aforementioned embodiments in this paragraph, N in the PAM sequence motif can be any nucleotide residue, e.g., any of A, G, C or T. In some embodiments, the CRISPR-Cas effector protein may be a Cas13a derived from Leptotrichia shahii and/or may recognize a protospacer flanking sequence (PFS) (or RNA PAM (rPAM)) sequence motif of a single 3′ A, U, or C, which may be located within the target nucleic acid.

[0123] A Type V CRISPR-Cas effector protein useful with embodiments of the invention may be any Type V CRISPR-Cas nuclease. Exemplary Type V CRISPR-Cas effector proteins include, but are not limited, to Cas12a (Cpf1), Cas12b, Cas12c (C2c3), Cas12d (CasY), Cas12c (CasX), Cas12g, Cas12h, Cas12i, C2c1, C2c4, C2c5, C2c8, C2c9, C2c10, Cas14a, Cas14b, and/or Cas14c nuclease. In some embodiments, a Type V CRISPR-Cas effector protein may be a Cas12a. In some embodiments, a Type V CRISPR-Cas effector protein may be a nickase, optionally, a Cas12a nickase. In some embodiments, a Type V CRISPR-Cas effector protein may be a Cas12b (e.g., SEQ ID NO:69).

[0124] In some embodiments, the CRISPR-Cas effector protein may be a Type V Clustered Regularly Interspaced Short Palindromic Repeats (CRISPR)-Cas nuclease. Cas12a differs in several respects from the more well-known Type II CRISPR Cas9 nuclease. For example, Cas9 recognizes a G-rich protospacer-adjacent motif (PAM) that is 3′ to its guide RNA (gRNA, sgRNA, crRNA, crDNA, CRISPR array) binding site (protospacer, target nucleic acid, target DNA) (3′-NGG), while Cas12a recognizes a T-rich PAM that is located 5′ to the target nucleic acid (5′-TTN, 5′-TTTN. In fact, the orientations in which Cas9 and Cas12a bind their guide RNAs are very nearly reversed in relation to their N and C termini. Furthermore, Cas12a enzymes use a single guide RNA (gRNA, CRISPR array, crRNA) rather than the dual guide RNA (sgRNA (e.g., crRNA and tracrRNA)) found in natural Cas9 systems, and Cas12a processes its own gRNAs. Additionally, Cas12a nuclease activity produces staggered DNA double stranded breaks instead of blunt ends produced by Cas9 nuclease activity, and Cas12a relies on a single RuvC domain to cleave both DNA strands, whereas Cas9 utilizes an HNH domain and a RuvC domain for cleavage.

[0125] A CRISPR Cas12a effector protein useful with this invention may be any known or later identified Cas12a (previously known as Cpf1) (see, e.g., U.S. Pat. No. 9,790,490, which is incorporated by reference for its disclosures of Cpf1 (Cas12a) sequences). The term “Cas12a” refers to an RNA-guided protein that can have nuclease activity, the protein comprising a guide nucleic acid binding domain and an active, inactive, or partially active DNA cleavage domain, thereby the RNA-guided nuclease activity of the Cas12a may be active, inactive or partially active, respectively. In some embodiments, a Cas12a useful with the invention may comprise a mutation in the nuclease active site (e.g., a RuvC site of the Cas12a domain). A Cas12a having a mutation in its nuclease domain and/or nuclease active site, and therefore, no longer comprising nuclease activity, is commonly referred to as deadCas12a (e.g., dCas12a). In some embodiments, a Cas12a having a mutation in its nuclease domain and/or nuclease active site may have impaired activity, e.g., may have reduced nickase activity. In some embodiments, a Cas12a may have an amino acid sequence of any one of SEQ ID NOs:39-65.

[0126] In some embodiments, a CRISPR-Cas effector protein may be optimized for expression in an organism, for example, in an animal (e.g., a mammal such as a human), a plant, a fungus, an archaeon, or a bacterium. In some embodiments, a CRISPR-Cas effector protein (e.g., Cas12a polypeptide/domain or a Cas9 polypeptide/domain) may be optimized for expression in a plant.

[0127] In some embodiments, a CRISPR-Cas effector protein (e.g., an engineered CRISPR-Cas effector protein) is a target strand nickase and/or a non-target strand nickase. In some embodiments, a CRISPR-Cas effector protein (e.g., an engineered CRISPR-Cas effector protein) is a non-target strand nickase. In some embodiments, a CRISPR-Cas effector protein is an engineered protein that has an amino acid sequence having at least 70%, 75%, 80%, 85%, 90%, 95%, 96%, 97%, 98%, 99%, or 100% sequence identity to one or more of SEQ ID NOs:254-420.

[0128] Any deaminase domain/polypeptide useful for base editing may be used with this invention. A “cytosine deaminase” and “cytidine deaminase” as used herein refer to a polypeptide or domain thereof that catalyzes or is capable of catalyzing cytosine deamination in that the polypeptide or domain catalyzes or is capable of catalyzing the removal of an amine group from a cytosine base. Thus, a cytosine deaminase may result in conversion of cytosine to a thymidine (through a uracil intermediate), causing a C to T conversion, or a G to A conversion in the complementary strand in the genome. Thus, in some embodiments, the cytosine deaminase generates a C→T conversion in the sense (e.g., “+”; template) strand of the target nucleic acid or a G→A conversion in antisense (e.g., “−”, complementary) strand of the target nucleic acid. In some embodiments, a cytosine deaminase generates a C to T, G, or A conversion in the complementary strand in the genome.

[0129] A cytosine deaminase useful with this invention may be any known or later identified cytosine deaminase from any organism (see, e.g., U.S. Pat. No. 10,167,457 and Thuronyi et al. Nat. Biotechnol. 37:1070-1079 (2019), each of which is incorporated by reference herein for its disclosure of cytosine deaminases). Cytosine deaminases can catalyze the hydrolytic deamination of cytidine or deoxycytidine to uridine or deoxyuridine, respectively. Thus, in some embodiments, a deaminase or deaminase domain useful with this invention may be a cytidine deaminase domain, catalyzing the hydrolytic deamination of cytosine to uracil. In some embodiments, a cytosine deaminase may be a variant of a naturally-occurring cytosine deaminase, including, but not limited to, a primate (e.g., a human, monkey, chimpanzee, gorilla), a dog, a cow, a rat or a mouse. Thus, in some embodiments, an cytosine deaminase useful with the invention may be about 70% to about 100% identical to a wild-type cytosine deaminase (e.g., about 70%, 71%, 72%, 73%, 74%, 75%, 76%, 77%, 78%, 79%, 80%, 81%, 82%, 83%, 84%, 85%, 86%, 87%, 88%, 89%, 90%, 91%, 92%, 93%, 94%, 95%, 96%, 97%, 98%, 99%, or 100% identical, and any range or value therein, to a naturally occurring cytosine deaminase).

[0130] In some embodiments, a cytosine deaminase useful with the invention may be an apolipoprotein B mRNA-editing complex (APOBEC) family deaminase. In some embodiments, the cytosine deaminase may be an APOBEC1 deaminase, an APOBEC2 deaminase, an APOBEC3A deaminase, an APOBEC3B deaminase, an APOBEC3C deaminase, an APOBEC3D deaminase, an APOBEC3F deaminase, an APOBEC3G deaminase, an APOBEC3H deaminase, an APOBEC4 deaminase, a human activation induced deaminase (hAID), an rAPOBEC1, FERNY, and/or a CDA1, optionally a pmCDA1, an atCDAl (e.g., At2g19570), and evolved versions of the same. Evolved deaminases are disclosed in, for example, U.S. Pat. No. 10,113,163, Gaudelli et al. Nature 551(7681): 464-471 (2017)) and Thuronyi et al. (Nature Biotechnology 37:1070-1079 (2019)), each of which are incorporated by reference herein for their disclosure of deaminases and evolved deaminases. In some embodiments, the cytosine deaminase may be an APOBEC1 deaminase having the amino acid sequence of SEQ ID NO:95. In some embodiments, the cytosine deaminase may be an APOBEC3A deaminase having the amino acid sequence of SEQ ID NO:96. In some embodiments, the cytosine deaminase may be an CDA1 deaminase, optionally a CDA1 having the nucleotide sequence of SEQ ID NO:97. In some embodiments, the cytosine deaminase may be a FERNY deaminase, optionally a FERNY having the amino acid sequence of SEQ ID NO:98. In some embodiments, the cytosine deaminase may be a rAPOBEC1 deaminase, optionally a rAPOBEC1 deaminase having the amino acid sequence of SEQ ID NO:99. In some embodiments, the cytosine deaminase may be a hAID deaminase, optionally a hAID having the amino acid sequence of SEQ ID NO:100 or SEQ ID NO:101. In some embodiments, a cytosine deaminase useful with the invention may be about 70% to about 100% identical (e.g., 70%, 71%, 72%, 73%, 74%, 75%, 76%, 77%, 78%, 79%, 80%, 81%, 82%, 83%, 84%, 85%, 86%, 87%, 88%, 89%, 90%, 91%, 92%, 93%, 94%, 95%, 96%, 97%, 98%, 99%, 99.5% or 100% identical) to the amino acid sequence of a naturally occurring cytosine deaminase (e.g., “evolved deaminases”) (sec, e.g., SEQ ID NO:102, SEQ ID NO:103, SEQ ID NO:104). In some embodiments, a cytosine deaminase useful with the invention may be about 70% to about 99.5% identical (e.g., about 70%, 71%, 72%, 73%, 74%, 75%, 76%, 77%, 78%, 79%, 80%, 81%, 82%, 83%, 84%, 85%, 86%, 87%, 88%, 89%, 90%, 91%, 92%, 93%, 94%, 95%, 96%, 97%, 98%, 99%, or 99.5% identical) to the amino acid sequence of any one of SEQ ID NOs:95, 96, or 98-104 or to the nucleotide sequence of SEQ ID NO:97 (e.g., at least 80%, at least 85%, at least 90%, at least 92%, at least 95%, at least 96%, at least 97%, at least 98%, at least 99%, or at least 99.5% identical to the amino acid sequence of any one of SEQ ID NOs:95, 96, or 98-104 or to the nucleotide sequence of SEQ ID NO:97). In some embodiments, a polynucleotide encoding a cytosine deaminase may be codon optimized for expression in a plant and the codon optimized polypeptide may be about 70% to 99.5% identical to the reference polynucleotide.

[0131] An “adenine deaminase” and “adenosine deaminase” as used herein refer to a polypeptide or domain thereof that catalyzes or is capable of catalyzing the hydrolytic deamination (e.g., removal of an amine group from adenine) of adenine or adenosine. In some embodiments, an adenine deaminase may catalyze the hydrolytic deamination of adenosine or deoxyadenosine to inosine or deoxyinosine, respectively. In some embodiments, the adenosine deaminase may catalyze the hydrolytic deamination of adenine or adenosine in DNA. In some embodiments, an adenine deaminase optionally encoded by a nucleic acid construct of the invention may generate an A→G conversion in the sense (e.g., “+”; template) strand of the target nucleic acid or a T→C conversion in the antisense (e.g., “−”, complementary) strand of the target nucleic acid. An adenine deaminase useful with this invention may be any known or later identified adenine deaminase from any organism (see, e.g., U.S. Pat. No. 10,113,163, which is incorporated by reference herein for its disclosure of adenine deaminases).

[0132] In some embodiments, an adenosine deaminase may be a variant of a naturally-occurring adenine deaminase. Thus, in some embodiments, an adenosine deaminase may be about 70% to 100% identical to a wild-type adenine deaminase (e.g., about 70%, 71%, 72%, 73%, 74%, 75%, 76%, 77%, 78%, 79%, 80%, 81%, 82%, 83%, 84%, 85%, 86%, 87%, 88%, 89%, 90%, 91%, 92%, 93%, 94%, 95%, 96%, 97%, 98%, 99%, or 100% identical, and any range or value therein, to a naturally occurring adenine deaminase). In some embodiments, the deaminase or deaminase does not occur in nature and may be referred to as an engineered, mutated or evolved adenosine deaminase. Thus, for example, an engineered, mutated or evolved adenine deaminase polypeptide or an adenine deaminase domain may be about 70% to 99.9% identical to a naturally occurring adenine deaminase polypeptide/domain (e.g., about 70%, 71%, 72%, 73%, 74%, 75%, 76%, 77%, 78%, 79%, 80%, 81%, 82%, 83%, 84%, 85%, 86%, 87%, 88%, 89%, 90%, 91%, 92%, 93%, 94%, 95%, 96%, 97%, 98%, 99%, 99.1%, 99.2%, 99.3%, 99.4%, 99.5%, 99.6%, 99.7%, 99.8% or 99.9% identical, and any range or value therein, to a naturally occurring adenine deaminase polypeptide or adenine deaminase domain). In some embodiments, the adenosine deaminase may be from a bacterium, (e.g., Escherichia coli, Staphylococcus aureus, Haemophilus influenzae, Caulobacter crescentus, and the like).

[0133] In some embodiments, a polynucleotide encoding an adenine deaminase polypeptide/domain may be codon optimized for expression in a plant.

[0134] In some embodiments, an adenine deaminase domain may be a wild-type tRNA-specific adenosine deaminase domain, e.g., a tRNA-specific adenosine deaminase (TadA) and/or a mutated/evolved adenosine deaminase domain, e.g., mutated/evolved tRNA-specific adenosine deaminase domain (TadA*). In some embodiments, a TadA domain may be from E. coli. In some embodiments, the TadA may be modified, e.g., truncated, missing one or more N-terminal and/or C-terminal amino acids relative to a full-length TadA (e.g., 1, 2, 3, 4, 5, 6, 7, 8, 9, 10, 11, 12, 13, 14, 15, 6, 17, 18, 19, or 20 N-terminal and/or C terminal amino acid residues may be missing relative to a full length TadA). In some embodiments, a TadA polypeptide or TadA domain does not comprise an N-terminal methionine. In some embodiments, a wild-type E. coli TadA comprises the amino acid sequence of SEQ ID NO:105 or 106. In some embodiments, a mutated/evolved E. coli TadA* comprises the amino acid sequence of any one of SEQ ID NOs:107-110. In some embodiments, a polynucleotide encoding a TadA/TadA* may be codon optimized for expression in a plant. In some embodiments, an adenine deaminase may comprise all or a portion of an amino acid sequence of any one of SEQ ID NOs:111-116. In some embodiments, an adenine deaminase may comprise all or a portion of an amino acid sequence of any one of SEQ ID NOs:105-116.

[0135] In some embodiments, a nucleic acid construct of this invention may further encode a glycosylase inhibitor (e.g., a uracil glycosylase inhibitor (UGI) such as uracil-DNA glycosylase inhibitor). In some embodiments, the invention provides fusion proteins comprising an engineered protein and a UGI and/or one or more polynucleotides encoding the same, optionally wherein the one or more polynucleotides may be codon optimized for expression in a plant.

[0136] A “uracil glycosylase inhibitor” useful with the invention may be any protein or polypeptide that is capable of inhibiting a uracil-DNA glycosylase base-excision repair enzyme. In some embodiments, a UGI domain comprises a wild-type UGI or a fragment thereof. In some embodiments, a UGI domain useful with the invention may be about 70% to about 100% identical (e.g., 70%, 71%, 72%, 73%, 74%, 75%, 76%, 77%, 78%, 79%, 80%, 81%, 82%, 83%, 84%, 85%, 86%, 87%, 88%, 89%, 90%, 91%, 92%, 93%, 94%, 95%, 96%, 97%, 98%, 99%, 99.5% or 100% identical and any range or value therein) to the amino acid sequence of a naturally occurring UGI domain. In some embodiments, a UGI domain may comprise the amino acid sequence of SEQ ID NO:117 or a polypeptide having about 70% to about 99.5% identity to the amino acid sequence of SEQ ID NO:117 (e.g., at least 80%, at least 85%, at least 90%, at least 92%, at least 95%, at least 96%, at least 97%, at least 98%, at least 99%, or at least 99.5% identical to the amino acid sequence of SEQ ID NO:117). For example, in some embodiments, a UGI domain may comprise a fragment of the amino acid sequence of SEQ ID NO:117 that is 100% identical to a portion of consecutive nucleotides (e.g., 10, 15, 20, 25, 30, 35, 40, 45, 50, 55, 60, 65, 70, 75, 80 consecutive nucleotides; e.g., about 10, 15, 20, 25, 30, 35, 40, 45, to about 50, 55, 60, 65, 70, 75, 80 consecutive nucleotides) of the amino acid sequence of SEQ ID NO:117. In some embodiments, a UGI domain may be a variant of a known UGI (e.g., SEQ ID NO:117) having about 70% to about 99.5% identity (e.g., 70%, 71%, 72%, 73%, 74%, 75%, 76%, 77%, 78%, 79%, 80%, 81%, 82%, 83%, 84%, 85%, 86%, 87%, 88%, 89%, 90%, 91%, 92%, 93%, 94%, 95%, 96%, 97%, 98%, 99%, 99.5% identity, and any range or value therein) to the known UGI. In some embodiments, a polynucleotide encoding a UGI may be codon optimized for expression in a plant (e.g., a plant) and the codon optimized polypeptide may be about 70% to about 99.5% identical to the reference polynucleotide.

[0137] A protein of the present invention may be used in combination with a guide nucleic acid (e.g., guide RNA (gRNA), CRISPR array, CRISPR RNA, crRNA, or extended guide nucleic acid) that is designed to function with the protein and/or a CRISPR-Cas effector protein to modify a target nucleic acid. A guide nucleic acid useful with this invention may comprise at least one spacer sequence and at least one repeat sequence. The guide nucleic acid may be capable of forming a complex with a protein of the present invention and/or a CRISPR-Cas effector protein (e.g., with a nuclease domain of the protein) and the spacer sequence is capable of hybridizing to a target nucleic acid, thereby guiding the complex to the target nucleic acid, wherein the target nucleic acid may be modified (e.g., cleaved or edited) and/or modulated (e.g., modulating transcription) by a protein of the present invention.

[0138] In some embodiments, a CRISPR-Cas effector protein comprising a Cas9 domain (or a nucleic acid construct encoding the same) may be used in combination with a Cas9 guide nucleic acid to modify a target nucleic acid, and may be in or may form a complex.

[0139] Likewise, a CRISPR-Cas effector protein may comprise a Cas12a domain (or other selected CRISPR-Cas nuclease, e.g., C2c1, C2c3, Cas12b, Cas12c, Cas12d, Cas12f, Cas12i, Cas12e, Cas13a, Cas13b, Cas13c, Cas13d, Cas1, Cas1B, Cas2, Cas3, Cas3′, Cas3″, Cas4, Cas5,Cas6, Cas7, Cas8, Cas9 (also known as Csn1 and Csx12), Cas10, Csy1, Csy2, Csy3, Cse1, Cse2, Csc1, Csc2, Csa5, Csn2, Csm2, Csm3, Csm4, Csm5, Csm6, Cmr1, Cmr3, Cmr4, Cmr5, Cmr6, Csb1, Csb2, Csb3, Csx17, Csx14, Csx10, Csx16, CsaX, Csx3, Csx1, Csx15, Csf1, Csf2, Csf3, Csf4 (dinG), and/or Csf5), which may be used in combination with a Cas12a guide nucleic acid (or the guide nucleic acid for the other selected CRISPR-Cas nuclease) to modify a target nucleic acid, thereby editing the target nucleic acid.

[0140] A “guide nucleic acid,” “guide RNA,” “gRNA,” “CRISPR RNA/DNA” “crRNA” or “crDNA” as used herein means a nucleic acid that comprises at least one spacer sequence, which is complementary to (and hybridizes to) a target nucleic acid (e.g., a target DNA and/or a protospacer), and at least one repeat sequence (e.g., a repeat of a Type V Cas12a CRISPR-Cas system, or a fragment or portion thereof; a repeat of a Type II Cas9 CRISPR-Cas system, or fragment thereof; a repeat of a Type V C2c1 CRISPR Cas system, or a fragment thereof; a repeat of a CRISPR-Cas system of, for example, C2c3, Cas12a (also referred to as Cpf1), Cas12b, Cas12c, Cas12d, Cas12e, Cas12f, Cas12i, Cas13a, Cas13b, Cas13c, Cas13d, Cas1,Cas1B, Cas2, Cas3, Cas3′, Cas3″, Cas4, Cas5, Cas6, Cas7, Cas8, Cas9 (also known as Csn1 and Csx12), Cas10, Csy1, Csy2, Csy3, Cse1, Cse2, Csc1, Csc2, Csa5, Csn2, Csm2, Csm3, Csm4, Csm5, Csm6, Cmr1, Cmr3, Cmr4, Cmr5, Cmr6, Csb1, Csb2, Csb3, Csx17, Csx14, Csx10, Csx16, CsaX, Csx3, Csx1, Csx15, Csf1, Csf2, Csf3, Csf4 (dinG), and/or Csf5, or a fragment thereof), wherein the repeat sequence may be linked to the 5′ end and/or the 3′ end of the spacer sequence. In some embodiments, the guide nucleic acid comprises DNA. In some embodiments, the guide nucleic acid comprises RNA (e.g., is a guide RNA). The design of a gRNA of this invention may be based on a Type I, Type II, Type III, Type IV, Type V, and/or Type VI CRISPR-Cas system.

[0141] In some embodiments, a Cas12a gRNA may comprise, from 5′ to 3′, a repeat sequence (full length or portion thereof (“handle”); e.g., pseudoknot-like structure) and a spacer sequence.

[0142] In some embodiments, a guide nucleic acid may comprise more than one repeat sequence-spacer sequence (e.g., 2, 3, 4, 5, 6, 7, 8, 9, 10, or more repeat-spacer sequences) (e.g., repeat-spacer-repeat, e.g., repeat-spacer-repeat-spacer-repeat-spacer-repeat-spacer-repeat- spacer, and the like). The guide nucleic acids of this invention are synthetic, human-made and not found in nature. A gRNA can be quite long and may be used as an aptamer (like in the MS2 recruitment strategy) or other RNA structures hanging off the spacer.

[0143] A “repeat sequence” as used herein, refers to, for example, any repeat sequence of a wild-type CRISPR Cas locus (e.g., a Cas9 locus, a Cas12a locus, a C2c1 locus, etc.) or a repeat sequence of a synthetic crRNA that is functional with a CRISPR-Cas effector protein and/or protein of the present invention optionally encoded by a nucleic acid construct of the invention. A repeat sequence useful with this invention can be any known or later identified repeat sequence of a CRISPR-Cas locus (e.g., Type I, Type II, Type III, Type IV, Type V or Type VI) or it can be a synthetic repeat designed to function in a Type I, II, III, IV, V or VI CRISPR-Cas system. A repeat sequence may comprise a hairpin structure and/or a stem loop structure. In some embodiments, a repeat sequence may form a pseudoknot-like structure at its 5′ end (i.e., “handle”). Thus, in some embodiments, a repeat sequence can be identical to or substantially identical to a repeat sequence from wild-type Type I CRISPR-Cas loci, Type II, CRISPR-Cas loci, Type III, CRISPR-Cas loci, Type IV CRISPR-Cas loci, Type V CRISPR-Cas loci and/or Type VI CRISPR-Cas loci. A repeat sequence from a wild-type CRISPR-Cas locus may be determined through established algorithms, such as using the CRISPRfinder offered through CRISPRdb (sec, Grissa et al. Nucleic Acids Res. 35(Web Server issue):W52-7). In some embodiments, a repeat sequence or portion thereof is linked at its 3′ end to the 5′ end of a spacer sequence, thereby forming a repeat-spacer sequence (e.g., guide nucleic acid, guide RNA/DNA, crRNA, crDNA).

[0144] In some embodiments, a repeat sequence comprises, consists essentially of, or consists of at least 10 nucleotides depending on the particular repeat and whether the guide nucleic acid comprising the repeat is processed or unprocessed (e.g., about 10, 11, 12, 13, 14, 15, 16, 17, 18, 19, 20, 21, 22, 23, 24, 25, 26, 27, 28, 29, 30, 31, 32, 33, 34, 35, 36, 37, 38, 39, 40, 41, 42, 43, 44, 45, 46, 47, 48, 49, 50 to 100 or more nucleotides, or any range or value therein; e.g., about). In some embodiments, a repeat sequence comprises, consists essentially of, or consists of about 10 to about 20, about 10 to about 30, about 10 to about 45, about 10 to about 50, about 15 to about 30, about 15 to about 40, about 15 to about 45, about 15 to about 50, about 20 to about 30, about 20 to about 40, about 20 to about 50, about 30 to about 40, about 40 to about 80, about 50 to about 100 or more nucleotides.

[0145] A repeat sequence linked to the 5′ end of a spacer sequence can comprise a portion of a repeat sequence (e.g., 5, 6, 7, 8, 9, 10, 11, 12, 13, 14, 15, 16, 17, 18, 19, 20, 21, 22, 23, 24, 25, 26, 27, 28, 29, 30, 31, 32, 33, 34, 35 or more contiguous nucleotides of a wild-type repeat sequence). In some embodiments, a portion of a repeat sequence linked to the 5′ end of a spacer sequence can be about five to about ten consecutive nucleotides in length (e.g., about 5, 6, 7, 8, 9, 10 nucleotides) and have at least 90% sequence identity (e.g., at least about 90%, 91%, 92%, 93%, 94%, 95%, 96%, 97%, 98%, 99%, or more) to the same region (e.g., 5′ end) of a wild-type CRISPR Cas repeat nucleotide sequence. In some embodiments, a portion of a repeat sequence may comprise a pseudoknot-like structure at its 5′ end (e.g., “handle”).

[0146] A “spacer sequence” as used herein is a nucleotide sequence that is complementary to a target nucleic acid (e.g., target DNA) (e.g., protospacer). The spacer sequence can be fully complementary or substantially complementary (e.g., at least about 70% complementary (e.g., about 70%, 71%, 72%, 73%, 74%, 75%, 76%, 77%, 78%, 79%, 80%, 81%, 82%, 83%, 84%, 85%, 86%, 87%, 88%, 89%, 90%, 91%, 92%, 93%, 94%, 95%, 96%, 97%, 98%, 99%, or more)) to a target nucleic acid. Thus, in some embodiments, the spacer sequence can have one, two, three, four, or five mismatches as compared to the target nucleic acid, which mismatches can be contiguous or noncontiguous. In some embodiments, the spacer sequence can have 70% complementarity to a target nucleic acid. In other embodiments, the spacer nucleotide sequence can have 80% complementarity to a target nucleic acid. In still other embodiments, the spacer nucleotide sequence can have 85%, 90%, 95%, 96%, 97%, 98%, 99% or 99.5% complementarity, and the like, to the target nucleic acid (protospacer). In some embodiments, the spacer sequence is 100% complementary to the target nucleic acid. A spacer sequence may have a length from about 15 nucleotides to about 30 nucleotides (e.g., 15, 16, 17, 18, 19, 20, 21, 22, 23, 24, 25, 26, 27, 28, 29, or 30 nucleotides, or any range or value therein). Thus, in some embodiments, a spacer sequence may have complete complementarity or substantial complementarity over a region of a target nucleic acid (e.g., protospacer) that is at least about 15 nucleotides to about 30 nucleotides in length. In some embodiments, the spacer is about 20 nucleotides in length. In some embodiments, the spacer is about 21, 22, or 23 nucleotides in length.

[0147] In some embodiments, the 5′ region of a spacer sequence of a guide nucleic acid may be fully complementary to a target nucleic acid, while the 3′ region of the spacer may be substantially complementary to the target nucleic acid (such as for a spacer in a Type V CRISPR-Cas system), or the 3′ region of a spacer sequence of a guide nucleic acid may be fully complementary to a target nucleic acid, while the 5′ region of the spacer may be substantially complementary to the target nucleic acid (such as for a spacer in a Type II CRISPR-Cas system), and therefore, the overall complementarity of the spacer sequence to the target nucleic acid may be less than 100%. Thus, for example, in a guide nucleic acid for a Type V CRISPR-Cas system, the first 1, 2, 3, 4, 5, 6, 7, 8, 9, 10 nucleotides in the 5′ region (i.e., seed region) of, for example, a 20 nucleotide spacer sequence may be 100% complementary to the target nucleic acid, while the remaining nucleotides in the 3′ region of the spacer sequence are substantially complementary (e.g., at least about 70% complementary) to the target nucleic acid. In some embodiments, the first 1 to 8 nucleotides (e.g., the first 1, 2, 3, 4, 5, 6, 7, 8, nucleotides, and any range therein) of the 5′ end of the spacer sequence may be 100% complementary to the target nucleic acid, while the remaining nucleotides in the 3′ region of the spacer sequence are substantially complementary (e.g., at least about 50% complementary (e.g., 50%, 55%, 60%, 65%, 70%, 71%, 72%, 73%, 74%, 75%, 76%, 77%, 78%, 79%, 80%, 81%, 82%, 83%, 84%, 85%, 86%, 87%, 88%, 89%, 90%, 91%, 92%, 93%, 94%, 95%, 96%, 97%, 98%, 99%, or more)) to the target nucleic acid.

[0148] As a further example, in a guide nucleic acid for a Type II CRISPR-Cas system, the first 1, 2, 3, 4, 5, 6, 7, 8, 9, 10 nucleotides in the 3′ region (i.e., seed region) of, for example, a 20 nucleotide spacer sequence may be 100% complementary to the target nucleic acid, while the remaining nucleotides in the 5′ region of the spacer sequence are substantially complementary (e.g., at least about 70% complementary) to the target nucleic acid. In some embodiments, the first 1 to 10 nucleotides (e.g., the first 1, 2, 3, 4, 5, 6, 7, 8, 9, 10 nucleotides, and any range therein) of the 3′ end of the spacer sequence may be 100% complementary to the target nucleic acid, while the remaining nucleotides in the 5′ region of the spacer sequence are substantially complementary (e.g., at least about 50% complementary (e.g., at least about 50%, 55%, 60%, 65%, 70%, 71%, 72%, 73%, 74%, 75%, 76%, 77%, 78%, 79%, 80%, 81%, 82%, 83%, 84%, 85%, 86%, 87%, 88%, 89%, 90%, 91%, 92%, 93%, 94%, 95%, 96%, 97%, 98%, 99%, or more or any range or value therein)) to the target nucleic acid. A recruiting guide RNA further comprises one or more recruiting motifs as described herein, which may be linked to the 5′ end of the guide or the 3′ end or it may be inserted into the recruiting guide nucleic acid (e.g., within the hairpin loop).

[0149] In some embodiments, a seed region of a spacer may be about 8 to about 10 nucleotides in length, about 5 to about 6 nucleotides in length, or about 6 nucleotides in length.

[0150] In some embodiments, a guide nucleic acid further comprises a reverse transcriptase template and may be referred to as an extended guide nucleic acid.

[0151] A guide nucleic acid and/or an extended guide nucleic acid may comprise one or more recruiting motifs as described herein, which may be linked to the 5′ end and/or the 3′ end of the guide nucleic acid and/or it may be inserted into the guide nucleic acid (e.g., within a hairpin loop of the guide nucleic acid).

[0152] A “target nucleic acid”, “target DNA,” “target nucleotide sequence,” “target region,” and “target region in the genome” are used interchangeably herein and refer to a region of an organism's (e.g., a plant's) genome that comprises a sequence that is fully complementary (100% complementary) or substantially complementary (e.g., at least 70% complementary (e.g., 70%, 71%, 72%, 73%, 74%, 75%, 76%, 77%, 78%, 79%, 80%, 81%, 82%, 83%, 84%, 85%, 86%, 87%, 88%, 89%, 90%, 91%, 92%, 93%, 94%, 95%, 96%, 97%, 98%, 99%, or more)) to a spacer sequence in a guide nucleic acid as defined herein. A target nucleic acid is targeted by an editing system (or a component thereof) as described herein. A target region useful for a CRISPR-Cas system may be located immediately 3′ (e.g., Type V CRISPR-Cas system) or immediately 5′ (e.g., Type II CRISPR-Cas system) to a PAM sequence in the genome of the organism (e.g., a plant genome or mammalian (e.g., human) genome). A target region may be selected from any region of at least 15 consecutive nucleotides (e.g., 16, 17, 18, 19, 20, 21, 22, 23, 24, 25, 26, 27, 28, 29, 30 nucleotides, and the like) located immediately adjacent to a PAM sequence.

[0153] A “protospacer sequence” or “protospacer” as used herein refer to a sequence that is fully or substantially complementary to (and can hybridize to) a spacer sequence of a guide nucleic acid. In some embodiments, the protospacer is all or a portion of a target nucleic acid as defined herein that is fully or substantially complementary (and hybridizes) to the spacer sequence of the CRISPR repeat-spacer sequences (e.g., guide nucleic acids, CRISPR arrays, crRNAs).

[0154] In the case of Type V CRISPR-Cas (e.g., Cas12a) systems and Type II CRISPR-Cas (Cas9) systems, the protospacer sequence is flanked by (e.g., immediately adjacent to) a protospacer adjacent motif (PAM). For Type IV CRISPR-Cas systems, the PAM is located at the 5′ end on the non-target strand and at the 3′ end of the target strand (see below, as an example).

```
      5′-NNNNNNNNNNNNNNNNNNN-3′ RNA Spacer
            |||||||||||||||||||
  3′AAANNNNNNNNNNNNNNNNNNN-5′ Target strand
      ||||
  5′TTTNNNNNNNNNNNNNNNNNNN-3′ Non-target strand
```

[0155] In the case of Type II CRISPR-Cas (e.g., Cas9) systems, the PAM is located immediately 3′ of the target region. The PAM for Type I CRISPR-Cas systems is located 5′ of the target strand. There is no known PAM for Type III CRISPR-Cas systems. Makarova et al. describes the nomenclature for all the classes, types and subtypes of CRISPR systems (Nature Reviews Microbiology 13:722-736 (2015)). Guide structures and PAMs are described by R. Barrangou (Genome Biol. 16:247 (2015)).

[0156] Canonical Cas12a PAMs are T rich. In some embodiments, a canonical Cas12a PAM sequence may be 5′-TTN, 5′-TTTN, or 5′-TTTV. In some embodiments, canonical Cas9 (e.g., S. pyogenes) PAMs may be 5′-NGG-3′. In some embodiments, non-canonical PAMs may be used but may be less efficient.

[0157] Additional PAM sequences may be determined by those skilled in the art through established experimental and computational approaches. Thus, for example, experimental approaches include targeting a sequence flanked by all possible nucleotide sequences and identifying sequence members that do not undergo targeting, such as through the transformation of target plasmid DNA (Esvelt et al. 2013. Nat. Methods 10:1116-1121; Jiang et al. 2013. Nat. Biotechnol. 31:233-239). In some aspects, a computational approach can include performing BLAST searches of natural spacers to identify the original target DNA sequences in bacteriophages or plasmids and aligning these sequences to determine conserved sequences adjacent to the target sequence (Briner and Barrangou. 2014. Appl. Environ. Microbiol. 80:994-1001; Mojica et al. 2009. Microbiology 155:733-740).

[0158] In some embodiments, the present invention provides expression cassettes and/or vectors comprising the nucleic acid constructs of the invention (e.g., one or more components of an editing system of the invention). In some embodiments, expression cassettes and/or vectors comprising the nucleic acid constructs of the invention and/or one or more guide nucleic acids may be provided. In some embodiments, a nucleic acid construct of the invention encodes a protein of the present invention and/or a deaminase, and each may be comprised on the same or on a separate expression cassette or vector from that comprising the one or more guide nucleic acids. When the nucleic acid construct encoding a protein of the present invention or the components of an editing system is/are comprised on separate expression cassette(s) or vector(s) from that comprising the guide nucleic acid, a target nucleic acid may be contacted with (e.g., provided with) the expression cassette(s) or vector(s) encoding the protein of the present invention or components of an editing system in any order from one another and the guide nucleic acid, e.g., prior to, concurrently with, or after the expression cassette comprising the guide nucleic acid is provided (e.g., contacted with the target nucleic acid).

[0159] Methods of recruiting one or more components of an editing system to each other and/or to a target nucleic acid are known in the art and may include the use of a recruiting polypeptide (e.g., a peptide tag or an affinity polypeptide) that interacts with a corresponding recruiting element (e.g., a peptide tag). In some embodiments, a guide nucleic acid may be linked to an RNA recruiting motif and a protein of the present invention may be linked to an affinity polypeptide capable of interacting with the RNA recruiting motif, thereby recruiting the polypeptide of the invention to the target nucleic acid. Alternatively, chemical interactions may be used to recruit a protein (e.g., a polypeptide of the present invention) to a target nucleic acid.

[0160] A “recruiting motif” as used herein refers to one half of a binding pair that may be used to recruit a compound to which the recruiting motif is bound to another compound that includes the other half of the binding pair (i.e., a “corresponding motif”). The recruiting motif and corresponding motif may bind noncovalently. In some embodiments, a recruiting motif is an RNA recruiting motif (e.g., an RNA recruiting motif that is capable of binding and/or configured to bind to an affinity polypeptide), an affinity polypeptide (e.g., an affinity polypeptide that is capable of binding and/or configured to bind an RNA recruiting motif and/or a peptide tag), or a peptide tag (e.g., a peptide tag that is capable of binding and/or configured to bind an affinity polypeptide). For example, when a recruiting motif is an RNA recruiting motif, the corresponding motif for the RNA recruiting motif may be an affinity polypeptide that binds the RNA recruiting motif. A further example is that when a recruiting motif is a peptide tag, the corresponding motif for the peptide tag may be an affinity polypeptide that binds the peptide tag. Thus, a compound comprising a recruiting motif (e.g., an affinity polypeptide) may be recruited to another compound (e.g., a guide nucleic acid) comprising a corresponding motif for the recruiting motif (e.g., an RNA recruiting motif).

[0161] A peptide tag (e.g., epitope) useful with this invention may include, but is not limited to, a GCN4 peptide tag (e.g., Sun-Tag), a c-Myc affinity tag, an HA affinity tag, a His affinity tag, an S affinity tag, a methionine-His affinity tag, an RGD-His affinity tag, a FLAG octapeptide, a strep tag or strep tag II, a V5 tag, and/or a VSV-G epitope. Any epitope that may be linked to a polypeptide and for which there is a corresponding affinity polypeptide that may be linked to another polypeptide may be used with this invention as a peptide tag. In some embodiments, a peptide tag may comprise 1 or 2 or more copies of a peptide tag (e.g., repeat unit, multimerized epitope (e.g., tandem repeats)) (e.g., 1, 2, 3, 4, 5, 6, 7, 8, 9, 10, 11, 12, 13, 14, 15, 16, 17, 18, 19, 20, 21, 22, 23, 24, 25 or more repeat units. In some embodiments, an affinity polypeptide that interacts with/binds to a peptide tag may be an antibody. In some embodiments, the antibody may be a scFv antibody. In some embodiments, an affinity polypeptide that binds to a peptide tag may be synthetic (e.g., evolved for affinity interaction) including, but not limited to, an affibody, an anticalin, a monobody and/or a DARPin (see, e.g., Sha et al., Protein Sci. 26(5):910-924 (2017)); Gilbreth (Curr Opin Struc Biol 22(4):413-420 (2013)), U.S. Pat. No. 9,982,053, each of which are incorporated by reference in their entireties for the teachings relevant to affibodies, anticalins, monobodies and/or DARPins.

[0162] In some embodiments, a guide nucleic acid may be linked to an RNA recruiting motif, and a polypeptide to be recruited (e.g., a polypeptide of the present invention) may be fused to an affinity polypeptide that binds to the RNA recruiting motif, wherein the guide binds to the target nucleic acid and the RNA recruiting motif binds to the affinity polypeptide, thereby recruiting the polypeptide to the guide and contacting the target nucleic acid with the polypeptide (e.g., a polypeptide of the present invention). In some embodiments, two or more polypeptides may be recruited to a guide nucleic acid, thereby contacting the target nucleic acid with two or more polypeptides (e.g., one or more polypeptide(s) of the present invention).

[0163] In some embodiments of the invention, a guide RNA may be linked to one or to two or more RNA recruiting motifs (e.g., 1, 2, 3, 4, 5, 6, 7, 8, 9, 10 or more motifs; e.g., at least 10 to about 25 motifs), optionally wherein the two or more RNA recruiting motifs may be the same RNA recruiting motif or different RNA recruiting motifs. In some embodiments, an RNA recruiting motif and corresponding affinity polypeptide may include, but is not limited, to a telomerase Ku binding motif (e.g., Ku binding hairpin) and the corresponding affinity polypeptide Ku (e.g., Ku heterodimer), a telomerase Sm7 binding motif and the corresponding affinity polypeptide Sm7, an MS2 phage operator stem-loop and the corresponding affinity polypeptide MS2 Coat Protein (MCP), a PP7 phage operator stem-loop and the corresponding affinity polypeptide PP7 Coat Protein (PCP), an SfMu phage Com stem-loop and the corresponding affinity polypeptide Com RNA binding protein, a PUF binding site (PBS) and the affinity polypeptide Pumilio/fem-3 mRNA binding factor (PUF), and/or a synthetic RNA-aptamer and the aptamer ligand as the corresponding affinity polypeptide. In some embodiments, the RNA recruiting motif and corresponding affinity polypeptide may be an MS2 phage operator stem-loop and the affinity polypeptide MS2 Coat Protein (MCP). In some embodiments, the RNA recruiting motif and corresponding affinity polypeptide may be a PUF binding site (PBS) and the affinity polypeptide Pumilio/fem-3 mRNA binding factor (PUF). Exemplary RNA recruiting motifs and corresponding affinity polypeptides that may be useful with this invention can include, but are not limited to, SEQ ID NOs:118-128.

[0164] In some embodiments, the components for recruiting polypeptides and nucleic acids may include those that function through chemical interactions that may include, but are not limited to, rapamycin-inducible dimerization of FRB-FKBP; Biotin-streptavidin; SNAP tag; Halo tag; CLIP tag; DmrA-DmrC heterodimer induced by a compound; bifunctional ligand (e.g., chemically induced dimerization).

[0165] As described herein, a “peptide tag” may be employed to recruit one or more polypeptides. A peptide tag may be any polypeptide that is capable of being bound by a corresponding motif such as an affinity polypeptide. A peptide tag may also be referred to as an “epitope” and when provided in multiple copies, a “multimerized epitope.” Example peptide tags can include, but are not limited to, a GCN4 peptide tag (e.g., Sun-Tag), a c-Myc affinity tag, an HA affinity tag, a His affinity tag, an S affinity tag, a methionine-His affinity tag, an RGD-His affinity tag, a FLAG octapeptide, a strep tag or strep tag II, a V5 tag, and/or a VSV-G epitope. In some embodiments, a peptide tag may also include phosphorylated tyrosines in specific sequence contexts recognized by SH2 domains, characteristic consensus sequences containing phosphoserines recognized by 14-3-3 proteins, proline rich peptide motifs recognized by SH3 domains, PDZ protein interaction domains or the PDZ signal sequences, and an AGO hook motif from plants. Peptide tags are disclosed in WO2018/136783 and U.S. Patent Application Publication No. 2017/0219596, which are incorporated by reference for their disclosures of peptide tags. Peptide tags that may be useful with this invention can include, but are not limited to, SEQ ID NOs:129, 130, 132, and 133. Affinity polypeptides useful with peptide tags include, but are not limited to, SEQ ID NOs:131 and 134.

[0166] A peptide tag may comprise or be present in one copy or in 2 or more copies of the peptide tag (e.g., multimerized peptide tag or multimerized epitope) (e.g., about 2, 3, 4, 5, 6, 7, 8, 9, 10, 11, 12, 13, 14, 15, 16, 17, 18, 9, 20, 21, 22, 23, 24, or 25 or more peptide tags). When multimerized, the peptide tags may be fused directly to one another or they may be linked to one another via one or more amino acids (e.g., 1, 2, 3, 4, 5, 6, 7, 8, 9, 10, 11, 12, 13, 14, 15, 16, 17, 18, 19, 20 or more amino acids, optionally about 3 to about 10, about 4 to about 10, about 5 to about 10, about 5 to about 15, or about 5 to about 20 amino acids, and the like, and any value or range therein. Thus, in some embodiments, a CRISPR-Cas effector protein and/or polypeptide of the invention may be fused to one peptide tag or to two or more peptide tags, optionally wherein the two or more peptide tags are fused to one another via one or more amino acid residues. In some embodiments, a peptide tag useful with the invention may be a single copy of a GCN4 peptide tag or epitope or may be a multimerized GCN4 epitope comprising about 2 to about 25 or more copies of the peptide tag (e.g., about 2, 3, 4, 5, 6, 7, 8, 9, 10, 11, 12, 13, 14, 15, 16, 17, 18, 19, 20, 21, 22, 23, 24, 25 or more copies of a GCN4 epitope or any range therein).

[0167] In some embodiments, a peptide tag may be fused to a CRISPR-Cas polypeptide or domain. In some embodiments, a peptide tag may be fused or linked to the C-terminus of a CRISPR-Cas effector protein to form a CRISPR-Cas fusion protein. In some embodiments, a peptide tag may be fused or linked to the N-terminus of a CRISPR-Cas effector protein to form a CRISPR-Cas fusion protein. In some embodiments, a peptide tag may be fused within a CRISPR-Cas effector protein (e.g., a peptide tag may be in a loop region of a CRISPR-Cas effector protein). In some embodiments, peptide tag may be fused to or a polypeptide of the present invention.

[0168] An “affinity polypeptide” (e.g., “recruiting polypeptide”) refers to any polypeptide that is capable of binding to its corresponding peptide tag, peptide tag, or RNA recruiting motif. An affinity polypeptide for a peptide tag may be, for example, an antibody and/or a single chain antibody that specifically binds the peptide tag, respectively. In some embodiments, an antibody for a peptide tag may be, but is not limited to, an scFv antibody. In some embodiments, an affinity polypeptide may be fused or linked to the N-terminus of a polypeptide of the present invention. In some embodiments, the affinity polypeptide is stable under the reducing conditions of a cell or cellular extract.

[0169] The nucleic acid constructs of the invention and/or guide nucleic acids may be comprised in one or more expression cassettes as described herein. In some embodiments, a nucleic acid construct of the invention may be comprised in the same or in a separate expression cassette or vector from that comprising a guide nucleic acid and/or an extended guide nucleic acid.

[0170] In some embodiments, a nucleic acid construct, expression cassette, or vector of the invention that is optimized for expression in an organism (e.g., a human or plant) may be about 70% to 100% identical (e.g., about 70%, 71%, 72%, 73%, 74%, 75%, 76%, 77%, 78%, 79%, 80%, 81%, 82%, 83%, 84%, 85%, 86%, 87%, 88%, 89%, 90%, 91%, 92%, 93%, 94%, 95%, 96%, 97%, 98%, 99%, 99.5% or 100%) to a nucleic acid construct, expression cassette or vector comprising the same polynucleotide(s) but which have not been codon optimized for expression in the organism.

[0171] When used in combination with a guide nucleic acid, a nucleic acid construct of the invention (and expression cassette and/or vector comprising the same) may be used to modify a target nucleic acid and/or its expression. A target nucleic acid may be contacted with a nucleic acid construct of the invention and/or expression cassettes and/or vectors comprising the same prior to, concurrently with or after contacting the target nucleic acid with the guide nucleic acid/recruiting guide nucleic acid (and/or expression cassettes and vectors comprising the same.

[0172] According to embodiments of the present invention, provided herein are polypeptides (e.g., engineered proteins). An “engineered protein” as used herein refers to a polypeptide or protein that is not found naturally in nature. An engineered protein may be referred to as a mutant protein. In some embodiments, a mutant protein comprises a non-natural mutation (e.g., 1, 2, 3, 4, 5, 6, 7, 8, 9, 10, or more non-natural mutation(s)). A protein of the present invention may be mutated relative to (e.g., compared to) any one of SEQ ID NOs:254-355 or 386 such that the mutant protein has an arginine residue at amino acid residue 14, 152, 156, 157, 159, 160, 165, 167, 168, 169, 251, 257, 260, 264, 272, 497, 653, 657, 660, 662, 1043, 1045, 1092, 1093, 1096, 1127, 1129, 1130, 1132, and/or 1133 corresponding to the amino acid residue position numbering of any one of SEQ ID NOs:254-355 or 386 when optimally aligned thereto. In some embodiments, a protein (e.g., an engineered protein) of the present invention comprises an amino acid sequence having at least 70%, 75%, 80%, 85%, 90%, 95%, 96%, 97%, 98%, 99%, 99.1%, 99.2%, 99.3%, 99.4%, 99.5%, 99.6%, 99.7%, 99.8%, 99.9%, or more sequence identity to SEQ ID NO:386 when optimally aligned thereto, wherein the amino acid sequence, when optimally aligned to SEQ ID NO:386, has an arginine residue at amino acid residue 14, 152, 156, 157, 159, 160, 165, 167, 168, 169, 251, 257, 260, 264, 272, 497, 653, 657, 660, 662, 1043, 1045, 1092, 1093, 1096, 1127, 1129, 1130, 1132, and/or 1133 corresponding to the amino acid residue position numbering of SEQ ID NO:386. In some embodiments, a protein of the present invention comprises an amino acid sequence having at least 70%, 75%, 80%, 85%, 90%, 95%, 96%, 97%, 98%, 99%, 99.1%, 99.2%, 99.3%, 99.4%, 99.5%, 99.6%, 99.7%, 99.8%, 99.9%, or more sequence identity to SEQ ID NO:346 when optimally aligned thereto, wherein the amino acid sequence, when optimally aligned to SEQ ID NO:346, has an arginine residue at amino acid residue 14, 152, 156, 157, 159, 160, 165, 167, 168, 169, 251, 257, 260, 264, 272, 497, 653, 657, 660, 662, 1043, 1045, 1092, 1093, 1096, 1127, 1129, 1130, 1132, and/or 1133 corresponding to the amino acid residue position numbering of SEQ ID NO:346.

[0173] FIG. 3 demonstrates an optimal alignment of SEQ ID NO:356 to SEQ ID NO:386 (i.e., SEQ ID NO:356 optimally aligned to SEQ ID NO:386) with the amino acid residue position numbering in regard to the amino acid residue that is an arginine in SEQ ID NO:356 corresponding the amino acid residue position numbering of SEQ ID NO:386; thus, the protein of SEQ ID NO:356 is a S14R mutant of SEQ ID NO:386. Further, as can be seen in FIG. 3, the amino acid residue position numbering of SEQ ID NO:386 is based on a methionine residue (M) at the start (i.e., at amino acid residue position 1) and, as understood in the art, the methionine residue may be removed (which would change the amino acid residue position numbering of the sequence) such as in aligning it with a polypeptide and/or when fused to a polypeptide. In some embodiments, a protein of the present invention comprises an amino acid sequence (e.g., all or a portion of the protein) having at least 70%, 75%, 80%, 85%, 90%, 95%, 96%, 97%, 98%, 99%, 99.5% or more sequence identity to amino acid residues 1, 2, 3, 4, 5, or 6 to 1371, 1372, 1373, 1374, 1375, or 1376 of SEQ ID NO:386. For example, a protein of the present invention may comprise an amino acid sequence (e.g., all or a portion of the protein) having at least 70%, 75%, 80%, 85%, 90%, 95%, 96%, 97%, 98%, 99%, 99.5% or more sequence identity to amino acid residues 2 to 1376 of SEQ ID NO:386 or having at least 70%, 75%, 80%, 85%, 90%, 95%, 96%, 97%, 98%, 99%, 99.5% or more sequence identity to amino acid residues 2 to 1374 of SEQ ID NO:386, wherein the amino acid sequence has an arginine residue at amino acid residue 14, 152, 156, 157, 159, 160, 165, 167, 168, 169, 251, 257, 260, 264, 272, 497, 653, 657, 660, 662, 1043, 1045, 1092, 1093, 1096, 1127, 1129, 1130, 1132, and/or 1133 corresponding to the amino acid residue position numbering of SEQ ID NO:386. In some embodiments, a protein of the present invention comprises an amino acid sequence (e.g., all or a portion of the protein) having at least 70%, 75%, 80%, 85%, 90%, 95%, 96%, 97%, 98%, 99%, 99.5% or more sequence identity to amino acid residues 2 to 1376 of SEQ ID NO:386, wherein the amino acid sequence has an arginine residue at amino acid residue 14, 152, 156, 157, 159, 160, 165, 167, 168, 169, 251, 257, 260, 264, 272, 497, 653, 657, 660, 662, 1043, 1045, 1092, 1093, 1096, 1127, 1129, 1130, 1132, and/or 1133 corresponding to the amino acid residue position numbering of SEQ ID NO:386.

[0174] In some embodiments, a protein of the present invention comprises an amino acid sequence having at least 70%, 75%, 80%, 85%, 90%, 95%, 96%, 97%, 98%, 99% or more sequence identity to SEQ ID NO:386 when optimally aligned thereto, and the amino acid sequence, when optimally aligned to SEQ ID NO:386, has an arginine residue at two or more amino acid residue positions selected from the group consisting of amino acid residue 14, 152, 156, 157, 159, 160, 165, 167, 168, 169, 251, 257, 260, 264, 272, 497, 653, 657, 660, 662, 1043, 1045, 1092, 1093, 1096, 1127, 1129, 1130, 1132, and 1133 corresponding to the amino acid residue position numbering of SEQ ID NO:386. In some embodiments, a protein of the present invention comprises an amino acid sequence having at least 70%, 75%, 80%, 85%, 90%, 95%, 96%, 97%, 98%, 99% or more sequence identity to SEQ ID NO:386 when optimally aligned thereto, and the amino acid sequence, when optimally aligned to SEQ ID NO:386, has an arginine residue at amino acid residue 14, 152, 156, 157, 159, 160, 165, 167, 168, 169, 251, 257, 260, 264, 272, 497, 653, 657, 660, 662, 1043, 1045, 1092, 1093, 1096, 1127, 1129, 1130, 1132, and/or 1133 corresponding to the amino acid residue position numbering of SEQ ID NO:386. In some embodiments, a protein of the present invention comprises an amino acid sequence having at least 70%, 75%, 80%, 85%, 90%, 95%, 96%, 97%, 98%, 99% or more sequence identity to SEQ ID NO:386 when optimally aligned thereto, and the amino acid sequence, when optimally aligned to SEQ ID NO:386, has an arginine residue at amino acid residue 152, 156, 159, and/or 160 corresponding to the amino acid residue position numbering of SEQ ID NO:386. In some embodiments, a protein of the present invention comprises an amino acid sequence having at least 70%, 75%, 80%, 85%, 90%, 95%, 96%, 97%, 98%, 99% or more sequence identity to SEQ ID NO:386 when optimally aligned thereto, and the amino acid sequence, when optimally aligned to SEQ ID NO:386, has an arginine residue at amino acid residue 662, 1129, and/or 1133 corresponding to the amino acid residue position numbering of SEQ ID NO:386. In some embodiments, a protein of the present invention comprises an amino acid sequence having at least 70%, 75%, 80%, 85%, 90%, 95%, 96%, 97%, 98%, 99% or more sequence identity to SEQ ID NO:386 when optimally aligned thereto, and the amino acid sequence, when optimally aligned to SEQ ID NO:386, has an arginine residue at amino acid residue 14, 272, 1043, and/or 1096 corresponding to the amino acid residue position numbering of SEQ ID NO:386.

[0175] In some embodiments, a protein of the present invention comprises an amino acid sequence (e.g., all or a portion of the protein) having at least 70%, 75%, 80%, 85%, 90%, 95%, 96%, 97%, 98%, 99%, 99.5% or more sequence identity to amino acid residues 1, 2, 3, 4, 5, or 6 to 1371, 1372, 1373, 1374, 1375, or 1376 of SEQ ID NO:346. For example, a protein of the present invention may comprise an amino acid sequence (e.g., all or a portion of the protein) having at least 70%, 75%, 80%, 85%, 90%, 95%, 96%, 97%, 98%, 99%, 99.5% or more sequence identity to amino acid residues 2 to 1376 of SEQ ID NO:346 or having at least 70%, 75%, 80%, 85%, 90%, 95%, 96%, 97%, 98%, 99%, 99.5% or more sequence identity to amino acid residues 2 to 1374 of SEQ ID NO:346, wherein the amino acid sequence has an arginine residue at amino acid residue 14, 152, 156, 157, 159, 160, 165, 167, 168, 169, 251, 257, 260, 264, 272, 497, 653, 657, 660, 662, 1043, 1045, 1092, 1093, 1096, 1127, 1129, 1130, 1132, and/or 1133 corresponding to the amino acid residue position numbering of SEQ ID NO:346. In some embodiments, a protein of the present invention comprises an amino acid sequence (e.g., all or a portion of the protein) having at least 70%, 75%, 80%, 85%, 90%, 95%, 96%, 97%, 98%, 99%, 99.5% or more sequence identity to amino acid residues 2 to 1376 of SEQ ID NO:346, wherein the amino acid sequence has an arginine residue at amino acid residue 14, 152, 156, 157, 159, 160, 165, 167, 168, 169, 251, 257, 260, 264, 272, 497, 653, 657, 660, 662, 1043, 1045, 1092, 1093, 1096, 1127, 1129, 1130, 1132, and/or 1133 corresponding to the amino acid residue position numbering of SEQ ID NO:346.

[0176] In some embodiments, a protein of the present invention comprises an amino acid sequence having at least 70%, 75%, 80%, 85%, 90%, 95%, 96%, 97%, 98%, 99% or more sequence identity to SEQ ID NO:346 when optimally aligned thereto, and the amino acid sequence, when optimally aligned to SEQ ID NO:346, has an arginine residue at two or more amino acid residue positions selected from the group consisting of amino acid residue 14, 152, 156, 157, 159, 160, 165, 167, 168, 169, 251, 257, 260, 264, 272, 497, 653, 657, 660, 662, 1043, 1045, 1092, 1093, 1096, 1127, 1129, 1130, 1132, and 1133 corresponding to the amino acid residue position numbering of SEQ ID NO:346. In some embodiments, a protein of the present invention comprises an amino acid sequence having at least 70%, 75%, 80%, 85%, 90%, 95%, 96%, 97%, 98%, 99% or more sequence identity to SEQ ID NO:346 when optimally aligned thereto, and the amino acid sequence, when optimally aligned to SEQ ID NO:346, has an arginine residue at amino acid residue 14, 152, 156, 157, 159, 160, 165, 167, 168, 169, 251, 257, 260, 264, 272, 497, 653, 657, 660, 662, 1043, 1045, 1092, 1093, 1096, 1127, 1129, 1130, 1132, and/or 1133 corresponding to the amino acid residue position numbering of SEQ ID NO:346. In some embodiments, a protein of the present invention comprises an amino acid sequence having at least 70%, 75%, 80%, 85%, 90%, 95%, 96%, 97%, 98%, 99% or more sequence identity to SEQ ID NO:346 when optimally aligned thereto, and the amino acid sequence, when optimally aligned to SEQ ID NO:346, has an arginine residue at amino acid residue 152, 156, 159, and/or 160 corresponding to the amino acid residue position numbering of SEQ ID NO:346. In some embodiments, a protein of the present invention comprises an amino acid sequence having at least 70%, 75%, 80%, 85%, 90%, 95%, 96%, 97%, 98%, 99% or more sequence identity to SEQ ID NO:346 when optimally aligned thereto, and the amino acid sequence, when optimally aligned to SEQ ID NO:346, has an arginine residue at amino acid residue 662, 1129, and/or 1133 corresponding to the amino acid residue position numbering of SEQ ID NO:346. In some embodiments, a protein of the present invention comprises an amino acid sequence having at least 70%, 75%, 80%, 85%, 90%, 95%, 96%, 97%, 98%, 99% or more sequence identity to SEQ ID NO:346 when optimally aligned thereto, and the amino acid sequence, when optimally aligned to SEQ ID NO:346, has an arginine residue at amino acid residue 14, 272, 1043, and/or 1096 corresponding to the amino acid residue position numbering of SEQ ID NO:346.

[0177] A protein of the present invention may have increased nuclease activity and/or increased nickase activity compared to a protein of SEQ ID NO:386 or SEQ ID NO:346 and/or compared to a protein of any one of SEQ ID NOs:39-65 when measured under the same conditions. In some embodiments, a protein of the present invention has increased efficiency in nicking the target strand and/or nontarget strand of a target nucleic acid compared to a protein of SEQ ID NO:386 or SEQ ID NO:346 and/or compared to a protein of any one of SEQ ID NOs:39-65 when measured under the same conditions. In some embodiments, a protein of the present invention provides improved or altered insertion and/or deletion (e.g., indel) size and/or composition, improved or altered deletion size in a target nucleic acid, improved or altered nicking ability on either strand (i.e., target or nontarget strand of a target nucleic acid), and/or increased nuclease activity compared to a protein of SEQ ID NO:386 or SEQ ID NO:346 and/or compared to a protein of any one of SEQ ID NOs:39-65 when measured under the same conditions. A protein of the present invention may provide improved INDEL formation compared to a protein of SEQ ID NO:386 or SEQ ID NO:346 and/or compared to a protein of any one of SEQ ID NOs:39-65 when measured under the same conditions.

[0178] In some embodiments, a protein of the present invention is a nuclease. In some embodiments, a protein of the present invention is a functional double-stranded nuclease. A protein of the present invention may be a functional double-stranded nuclease in vitro and/or in vivo. In some embodiments, a protein of the present invention is a target strand nickase, a nontarget strand nickase, or a target and nontarget strand nickase. In some embodiments, a protein of the present invention comprises an inactivating mutation in a nuclease active site (e.g., in a RuvC domain). In some embodiments, a protein of the present invention comprises a catalytically inactive domain.

[0179] In some embodiments, a protein of the present invention comprises an amino acid sequence having at least 70%, 75%, 80%, 85%, 90%, 95%, 96%, 97%, 98%, 99%, or 100% sequence identity to one or more of SEQ ID NOs:356-385 and 387-420. In some embodiments, a protein of the present invention comprises a methionine at amino acid residue 1 and an amino acid sequence having at least 70%, 75%, 80%, 85%, 90%, 95%, 96%, 97%, 98%, 99%, or 100% sequence identity to one or more of SEQ ID NOs:356-385 and 387-420. In some embodiments, a protein of the present invention is devoid of a methionine at amino acid residue 1 and comprises an amino acid sequence having at least 70%, 75%, 80%, 85%, 90%, 95%, 96%, 97%, 98%, 99%, or 100% sequence identity to one or more of SEQ ID NOs:356-385 and 387-420. In some embodiments, a protein of the present invention comprises an amino acid sequence of any one of SEQ ID NOs:356-385 and 387-420. In some embodiments, a protein of the present invention comprises an amino acid sequence (e.g., all or a portion of the protein) having at least 70%, 75%, 80%, 85%, 90%, 95%, 96%, 97%, 98%, 99%, 99.5% or 100% sequence identity to amino acid residues 1, 2, 3, 4, 5, or 6 to 1370, 1371, 1372, 1373, 1374, or 1375 of any one of SEQ ID NOs:356-385 and 417-420 and optionally the amino acid sequence may be fused to a polypeptide of interest, a linker, and/or an additional amino acid residue. In some embodiments, a protein of the present invention comprises an amino acid sequence (e.g., all or a portion of the protein) having at least 70%, 75%, 80%, 85%, 90%, 95%, 96%, 97%, 98%, 99%, 99.5% or 100% sequence identity to amino acid residues 1, 2, 3, 4, 5, or 6 to 1371, 1372, 1373, 1374, 1375, or 1376 of any one of SEQ ID NOs:387-420 and optionally the amino acid sequence may be fused to a polypeptide of interest, a linker, and/or an additional amino acid residue. For example, a protein of the present invention may comprise an amino acid sequence (e.g., all or a portion of the protein) having at least 70%, 75%, 80%, 85%, 90%, 95%, 96%, 97%, 98%, 99%, 99.5% or 100% sequence identity to amino acid residues 2 to 1376 of any one of SEQ ID NOs:387-420 and optionally the amino acid sequence may be fused to a polypeptide of interest and/or a linker. In some embodiments, a protein of the present invention is fused to a deaminase, a reverse transcriptase, a UGI, and/or a nuclear localization signal optionally via a linker (e.g., an amino acid residue and/or a peptide linker).

[0180] In some embodiments, in addition to an amino acid sequence of the present invention (e.g., an amino acid sequence having at least 70%, 75%, 80%, 85%, 90%, 95%, 96%, 97%, 98%, 99% or more sequence identity to SEQ ID NO:386 when optimally aligned thereto, wherein the amino acid sequence, when optimally aligned to SEQ ID NO:386, has an arginine residue at amino acid residue 14, 152, 156, 157, 159, 160, 165, 167, 168, 169, 251, 257, 260, 264, 272, 497, 653, 657, 660, 662, 1043, 1045, 1092, 1093, 1096, 1127, 1129, 1130, 1132, and/or 1133 corresponding to the amino acid residue position numbering of SEQ ID NO:386), a protein of the present invention includes one of more polypeptide(s) of interest (e.g., 1, 2, 3, 4, 5, 6, or more polypeptide(s) of interest), one or more linker(s) (e.g., one or more peptide linker(s)), and/or one or more (e.g., 1, 2, 3, or 4) additional amino acid residue(s). In some embodiments, a protein of the present invention includes a polypeptide of interest, a linker, and/or an additional amino acid residue that is/are fused to an amino acid sequence of the present invention (e.g., an amino acid sequence having at least 70%, 75%, 80%, 85%, 90%, 95%, 96%, 97%, 98%, 99%, or more sequence identity to SEQ ID NO:386 when optimally aligned thereto, wherein the amino acid sequence, when optimally aligned to SEQ ID NO:386, has an arginine residue at amino acid residue 14, 152, 156, 157, 159, 160, 165, 167, 168, 169, 251, 257, 260, 264, 272, 497, 653, 657, 660, 662, 1043, 1045, 1092, 1093, 1096, 1127, 1129, 1130, 1132, and/or 1133 corresponding to the amino acid residue position numbering of SEQ ID NO:386). In some embodiments, when a protein of the present invention includes a polypeptide of interest, linker, and/or additional amino acid residue, the portion (e.g., the amino acid sequence of the portion) of the protein having at least 70%, 75%, 80%, 85%, 90%, 95%, 96%, 97%, 98%, 99%, or more sequence identity to SEQ ID NO:386 is optimally aligned to SEQ ID NO:386 in order to determine the sequence identity of the portion and/or provides the amino acid residue numbering/position. In some embodiments, a polypeptide of interest may be fused to the N-terminus or C-terminus of an amino acid sequence of the present invention. For a protein and/or amino acid sequence of the present invention, the amino acid residue position numbering may be based on the amino acid residue position numbering of SEQ ID NO:386 to which the protein and/or amino acid sequence of the present invention is optimally aligned to.

[0181] In some embodiments, in addition to an amino acid sequence of the present invention (e.g., an amino acid sequence having at least 70%, 75%, 80%, 85%, 90%, 95%, 96%, 97%, 98%, 99% or more sequence identity to SEQ ID NO:346 when optimally aligned thereto, wherein the amino acid sequence, when optimally aligned to SEQ ID NO:346, has an arginine residue at amino acid residue 14, 152, 156, 157, 159, 160, 165, 167, 168, 169, 251, 257, 260, 264, 272, 497, 653, 657, 660, 662, 1043, 1045, 1092, 1093, 1096, 1127, 1129, 1130, 1132, and/or 1133 corresponding to the amino acid residue position numbering of SEQ ID NO:346), a protein of the present invention includes one of more polypeptide(s) of interest (e.g., 1, 2, 3, 4, 5, 6, or more polypeptide(s) of interest), one or more linker(s) (e.g., one or more peptide linker(s)), and/or one or more (e.g., 1, 2, 3, or 4) additional amino acid residue(s). In some embodiments, a protein of the present invention includes a polypeptide of interest, a linker, and/or an additional amino acid residue that is/are fused to an amino acid sequence of the present invention (e.g., an amino acid sequence having at least 70%, 75%, 80%, 85%, 90%, 95%, 96%, 97%, 98%, 99%, or more sequence identity to SEQ ID NO:346 when optimally aligned thereto, wherein the amino acid sequence, when optimally aligned to SEQ ID NO:346, has an arginine residue at amino acid residue 14, 152, 156, 157, 159, 160, 165, 167, 168, 169, 251, 257, 260, 264, 272, 497, 653, 657, 660, 662, 1043, 1045, 1092, 1093, 1096, 1127, 1129, 1130, 1132, and/or 1133 corresponding to the amino acid residue position numbering of SEQ ID NO:346). In some embodiments, when a protein of the present invention includes a polypeptide of interest, linker, and/or additional amino acid residue, the portion (e.g., the amino acid sequence of the portion) of the protein having at least 70%, 75%, 80%, 85%, 90%, 95%, 96%, 97%, 98%, 99%, or more sequence identity to SEQ ID NO:346 is optimally aligned to SEQ ID NO:346 in order to determine the sequence identity of the portion and/or provides the amino acid residue numbering/position. In some embodiments, a polypeptide of interest may be fused to the N-terminus or C-terminus of an amino acid sequence of the present invention. For a protein and/or amino acid sequence of the present invention, the amino acid residue position numbering may be based on the amino acid residue position numbering of SEQ ID NO:346 to which the protein and/or amino acid sequence of the present invention is optimally aligned to.

[0182] A protein of the present invention may include a deaminase and/or a reverse transcriptase. A deaminase and/or a reverse transcriptase may be fused to the N-terminus or C-terminus of an amino acid sequence of the present invention. In some embodiments, a protein of the present invention comprises a cytosine deaminase. In some embodiments, a protein of the present invention is fused (e.g., at the N-terminus or C-terminus) to a cytosine deaminase, optionally wherein the cytosine deaminase has at least 70%, 75%, 80%, 85%, 90%, 95%, 96%, 97%, 98%, 99%, or 100% sequence identity to one or more SEQ ID NOs:95, 96, and 98-104 and/or is encoded by a nucleotide having at least 70%, 75%, 80%, 85%, 90%, 95%, 96%, 97%, 98%, 99%, or 100% sequence identity to SEQ ID NO:97. In some embodiments, a protein of the present invention comprises an adenine deaminase. In some embodiments, a protein of the present invention is fused (e.g., at the N-terminus or C-terminus) to an adenine deaminase, optionally wherein the adenine deaminase has at least 70%, 75%, 80%, 85%, 90%, 95%, 96%, 97%, 98%, 99%, or 100% sequence identity to one or more SEQ ID NOs:105-116. In some embodiments, a protein of the present invention comprises a reverse transcriptase. In some embodiments, a protein of the present invention is fused (e.g., at the N-terminus or C- terminus) to a reverse transcriptase, optionally wherein the reverse transcriptase has at least 70%, 75%, 80%, 85%, 90%, 95%, 96%, 97%, 98%, 99%, or 100% sequence identity to one or more SEQ ID NOs:146-183 and 231-244 and/or is encoded by a nucleotide having at least 70%, 75%, 80%, 85%, 90%, 95%, 96%, 97%, 98%, 99%, or 100% sequence identity to SEQ ID NO:184-230 and 245-253. In some embodiments, a protein of the present invention is fused (e.g., at the N-terminus or C-terminus) to a recruitment polypeptide, optionally wherein the recruitment polypeptide has at least 70%, 75%, 80%, 85%, 90%, 95%, 96%, 97%, 98%, 99%, or 100% sequence identity to one or more SEQ ID NOs:119, 120, 122, 124, 126, and 128-134.

[0183] In some embodiments, a protein of the present invention comprises a nuclear localization signal (e.g., 1, 2, 3, or more nuclear localization signal(s)). A protein of the present invention may comprise a nuclear localization signal that is fused (e.g., directly or indirectly) to the N-terminus or C-terminus of an amino acid sequence of the present invention. In some embodiments, a protein of the present invention comprises a first nuclear localization signal that is fused (e.g., directly or indirectly) to the N-terminus of an amino acid sequence of the present invention and a second nuclear localization signal that is fused (e.g., directly or indirectly) to the C-terminus of the amino acid sequence. In some embodiments, a protein of the present invention comprises a nuclear localization signal having at least 70%, 75%, 80%, 85%, 90%, 95%, 96%, 97%, 98%, 99%, or 100% sequence identity to one or more of SEQ ID NOs:135-140 and/or is encoded by a nucleotide having at least 70%, 75%, 80%, 85%, 90%, 95%, 96%, 97%, 98%, 99%, or 100% sequence identity to one or more of SEQ ID NOs:141-145.

[0184] In some embodiments, a protein of the present invention comprises a uracil glycosylase inhibitor. A protein of the present invention may comprise a uracil glycosylase inhibitor that is fused (e.g., directly or indirectly) to the N-terminus or C-terminus of an amino acid sequence of the present invention. In some embodiments, a protein of the present invention comprises a uracil glycosylase inhibitor having at least 70%, 75%, 80%, 85%, 90%, 95%, 96%, 97%, 98%, 99%, or 100% sequence identity to one or more of SEQ ID NO:117.

[0185] According to some embodiments of the present invention, a complex is provided that comprises a guide nucleic acid and a protein of the present invention (e.g., a protein comprising an amino acid sequence of the present invention (e.g., an amino acid sequence having at least 70%, 75%, 80%, 85%, 90%, 95%, 96%, 97%, 98%, 99% or more sequence identity to SEQ ID NO:386 when optimally aligned thereto, wherein the amino acid sequence, when optimally aligned to SEQ ID NO:386, has an arginine residue at amino acid residue 14, 152, 156, 157, 159, 160, 165, 167, 168, 169, 251, 257, 260, 264, 272, 497, 653, 657, 660, 662, 1043, 1045, 1092, 1093, 1096, 1127, 1129, 1130, 1132, and/or 1133 corresponding to the amino acid residue position numbering of SEQ ID NO:386). In some embodiments, the protein is a catalytically inactive polypeptide. The protein may be a fusion protein. In some embodiments, the protein may be fused to a peptide tag. In some embodiments, the protein may be fused to an affinity polypeptide that is capable of binding a peptide tag or that is capable of binding an RNA recruiting motif. A complex of the present invention may comprise a guide nucleic acid that is optionally devoid of a reverse transcriptase template. In some embodiments, the complex further comprises a deaminase and/or reverse transcriptase. In some embodiments, the complex further comprises a deaminase and/or reverse transcriptase, wherein the deaminase and/or reverse transcriptase are not fused (i.e., covalently bonded) to a protein of the present invention (i.e., the protein of the present invention and the deaminase and/or reverse transcriptase are discrete proteins (e.g., two discrete proteins)). In some embodiments, the complex further comprises a deaminase and/or reverse transcriptase, wherein the deaminase and/or reverse transcriptase and a protein of the present invention are fused together (i.e., together are a single protein (a fusion protein)), optionally wherein a linker (e.g., a peptide linker) is between the deaminase and/or reverse transcriptase and the protein of the present invention.

[0186] A nucleic acid molecule may encode a protein and/or an amino acid sequence of the present invention, which may be present in an expression cassette and/or vector. A polynucleotide and/or recombinant nucleic acid construct of this invention can be codon optimized for expression. In some embodiments, a polynucleotide, nucleic acid construct, expression cassette, and/or vector of the present invention (e.g., that comprises/encodes a polypeptide of the present invention), and/or a guide nucleic acid) may be codon optimized for expression in an organism (e.g., an animal, a plant, a fungus, an archaeon, or a bacterium). In some embodiments, an expression cassette and/or vector of the present invention comprises a polynucleotide that encodes a promoter sequence and a polynucleotide that encodes a polypeptide of the present invention (e.g., a protein comprising an amino acid sequence of the present invention (e.g., an amino acid sequence having at least 70%, 75%, 80%, 85%, 90%, 95%, 96%, 97%, 98%, 99% or more sequence identity to SEQ ID NO:386 when optimally aligned thereto, wherein the amino acid sequence, when optimally aligned to SEQ ID NO:386, has an arginine residue at amino acid residue 14, 152, 156, 157, 159, 160, 165, 167, 168, 169, 251, 257, 260, 264, 272, 497, 653, 657, 660, 662, 1043, 1045, 1092, 1093, 1096, 1127, 1129, 1130, 1132, and/or 1133 corresponding to the amino acid residue position numbering of SEQ ID NO:386). The polynucleotide encoding the polypeptide of the present invention may be codon-optimized for expression in a particular organism (e.g., a human or plant). In some embodiments, the expression cassette and/or vector further comprises a polynucleotide encoding a deaminase and/or a reverse transcriptase that is codon-optimized for expression in the organism. In some embodiments, the organism is an animal (e.g., a human), a plant, a fungus, an archaeon, or a bacterium.

[0187] Methods of modifying a target nucleic acid in a cell are provided, and may comprise introducing an expression cassette and/or vector of the present invention into the cell to provide a modified target nucleic acid. In some embodiments, the cell is a mammalian cell (e.g., a human cell). In some embodiments, the cell is a plant cell and the method further comprises regenerating the plant cell comprising the modified target nucleic acid to produce a plant comprising the modified target nucleic acid. In some embodiments, the introducing of the expression cassette is carried out at a temperature of about 20° C. to about 42° C.

[0188] Methods for producing a polypeptide of the present invention are provided herein and may comprise culturing a cell or a plurality of cells that have been transformed with a nucleic acid encoding a polypeptide of the present invention; and isolating the polypeptide of the present invention to thereby produce the polypeptide. In some embodiments, the step of isolating is performed by dialysis, centrifugation, column purification, and/or the like.

[0189] Methods for performing reverse transcription are provided herein and may comprise contacting a target nucleic acid with a polypeptide of the present invention (e.g., a protein comprising an amino acid sequence having at least 70%, 75%, 80%, 85%, 90%, 95%, 96%, 97%, 98%, 99% or more sequence identity to SEQ ID NO:386 when optimally aligned thereto, wherein the amino acid sequence, when optimally aligned to SEQ ID NO:386, has an arginine residue at amino acid residue 14, 152, 156, 157, 159, 160, 165, 167, 168, 169, 251, 257, 260, 264, 272, 497, 653, 657, 660, 662, 1043, 1045, 1092, 1093, 1096, 1127, 1129, 1130, 1132, and/or 1133 corresponding to the amino acid residue position numbering of SEQ ID NO:386). In some embodiments, a method of the present invention may comprise comparing an activity (e.g., a reverse transcriptase activity), precise editing percentage, and/or indel percentage of a polypeptide of the present invention following contact to a target nucleic acid to the same activity, a precise editing percentage, and/or an indel percentage of a protein having a sequence of one of SEQ ID NO:146-183 and 231-244 and/or encoded by a sequence of one of SEQ ID NO:184-230 and 245-253 following contact of the protein to the same target nucleic acid. In some embodiments, the target nucleic acid is in a plant and/or in a plant cell that includes a cell wall. In some embodiments, the target nucleic acid is in a mammal and/or is in a mammalian cell.

[0190] Methods of modifying a target nucleic acid are provided herein and may comprise contacting the target nucleic acid with a protein of the present invention and a guide nucleic acid. In some embodiments, the protein of the present invention comprises an amino acid sequence having at least 70%, 75%, 80%, 85%, 90%, 95%, 96%, 97%, 98%, 99% or more sequence identity to SEQ ID NO:386 when optimally aligned thereto, wherein the amino acid sequence, when optimally aligned to SEQ ID NO:386, has an arginine residue at amino acid residue 14, 152, 156, 157, 159, 160, 165, 167, 168, 169, 251, 257, 260, 264, 272, 497, 653, 657, 660, 662, 1043, 1045, 1092, 1093, 1096, 1127, 1129, 1130, 1132, and/or 1133 corresponding to the amino acid residue position numbering of SEQ ID NO:386. In some embodiments, the target nucleic acid is in a plant and/or in a plant cell that includes a cell wall. In some embodiments, the method of modifying the target nucleic acid is a templated editing method.

[0191] A method of the present invention may comprise contacting the target nucleic acid with an extended guide nucleic acid. In some embodiments, the extended guide nucleic acid comprises a primer binding site and the target nucleic acid is double stranded and comprises a first strand and a second strand. In some embodiments, the primer binding site of the extended guide nucleic acid binds to the first strand or to the second strand of the target nucleic acid. In some embodiments, the second strand is the non-target strand of the target nucleic acid. In some embodiments, the target nucleic acid is double stranded and comprises a first strand and a second strand and the primer binding site binds to the first strand of the target nucleic acid. The first strand may be the target strand of the target nucleic acid and/or a protein of the present invention may be recruited to the first strand. In some embodiments, the target nucleic acid is double stranded and comprises a first strand and a second strand and the primer binding site of the extended guide nucleic acid binds to the second strand of the target nucleic acid. In some embodiments, the second strand is the non-target strand of the target nucleic acid and/or a protein of the present invention may be recruited to the second strand. In some embodiments, a protein of the present invention is a double stranded nuclease that cuts the first strand and the second strand of the target nucleic acid resulting in a double stranded break. In some embodiments, a protein of the present invention and an extended guide nucleic acid form a complex or are comprised in a complex.

[0192] A method of the present invention may comprise contacting a target nucleic acid with and/or introducing into a cell an extended guide nucleic acid that comprises (i) a CRISPR nucleic acid and/or a CRISPR nucleic acid and a tracr nucleic acid; and (ii) an extended portion comprising a primer binding site and a reverse transcriptase template (RT template). In some embodiments, the extended portion of the extended guide nucleic acid is fused to either the 5′ end or 3′ end of the CRISPR nucleic acid (e.g., 5′ to 3′: repeat-spacer-extended portion, or extended portion-repeat-spacer) and/or to the 5′ or 3′ end of the tracr nucleic acid. In some embodiments, the extended portion of the extended guide nucleic acid comprises, 5′ to 3′, an RT template and a primer binding site. In some embodiments, the extended portion of the extended guide nucleic acid is located 5′ of the crRNA.

[0193] In some embodiments, the primer binding site has a length of about one nucleotide to about 100 nucleotides. In some embodiments, the primer binding site is at least 45 nucleotides in length or about 45 nucleotides to about 100 nucleotides, e.g., 45, 46, 47, 48, 49, 50, 51, 52, 53, 54, 55, 56, 57, 58, 59, 60, 61, 62, 63, 64, 65, 66, 67, 68, 69, 70, 71, 72, 73, 74, 75, 76, 77, 78, 79, 80, 81, 82, 83, 84, 85, 86, 87, 88, 89, 90, 91, 92, 93, 94, 95, 96, 97, 98, 99, or 100 nucleotides in length.

[0194] In some embodiments, the RT template has a length of about one to about 100nucleotides, or the RT template can have a length of about 40 nucleotides or less, e.g., 40, 39, 38, 37, 36, 35, 34, 33, 32, 31, 30, 29, 28, 27, 26, 25, 24, 23, 22, 21, 20, 19, 18, 17, 16, 15, 14, 13, 12, 11, 10, 9, 8, 7, 6, 5, 4, 3, 2, or 1 nucleotide.

[0195] In some embodiments, the extended portion of the extended guide nucleic acid is linked to the CRISPR nucleic acid and/or the tracrRNA via a linker. The linker may be about 1 to about 100 nucleotides in length, e.g., 1, 2, 3, 4, 5, 6, 7, 8, 9, 10, 11, 12, 13, 14, 15, 16, 17, 18, 19, 20, 21, 22, 23, 24, 25 26, 27, 28, 29, 30, 31, 32, 33, 34, 35, 36, 37, 38, 39, 40, 41, 42, 43, 44, 45, 46, 47, 48, 49, 50, 51, 52, 53, 54, 55, 56, 57, 58, 59, 60, 61, 62, 63, 64, 65, 66, 67, 68, 69, 70, 71, 72, 73, 74, 75, 76, 77, 78, 79, 80, 81, 82, 83, 84, 85, 86, 87, 88, 89, 90, 91, 92, 93, 94, 95, 96, 97, 98, 99, or 100 nucleotides in length.

[0196] In some embodiments, in a method of the present invention, a CRISPR-Cas effector protein is a fusion protein and/or a polypeptide of the present invention is a fusion protein. In some embodiments, a protein of the present invention and/or a guide nucleic acid is fused to one or more components that recruit a deaminase and/or a reverse transcriptase to the protein. In some embodiments, a protein of the present invention is a fusion protein wherein the protein is fused, e.g., linked, to a peptide tag, for example, an epitope or a multimerized epitope, and a deaminase fusion protein comprising a deaminase that is fused, e.g., linked, to an affinity polypeptide that binds to the peptide tag. In some embodiments, the target nucleic acid is contacted with two or more deaminase proteins. In some embodiments, a protein of the present invention is a fusion protein in which the protein is fused, e.g., linked, to a peptide tag, for example, an epitope or a multimerized epitope, and a deaminase fusion protein comprising a deaminase fused (linked) to an affinity polypeptide that binds to the peptide tag.

[0197] In some embodiments, a guide nucleic acid is linked to an RNA recruiting motif, and a polypeptide of the present invention is a fusion protein comprising the polypeptide fused, e.g., linked, to an affinity polypeptide that binds to the RNA recruiting motif. In some embodiments, the target nucleic acid is contacted with two or more deaminase fusion proteins. In some embodiments, the guide nucleic acid, e.g., guide RNA, is linked to two or more RNA recruiting motifs, optionally wherein the two or more RNA recruiting motifs are the same RNA recruiting motif or different RNA recruiting motifs. In some embodiments, at least one of the two or more RNA recruiting motifs is located on the 3′ end of the guide nucleic acid.

[0198] A method of the present invention may comprise contacting the target nucleic acid with a Dna2 polypeptide and/or a 5′ flap endonuclease (FEN). In some embodiments, the FEN and/or Dna2 polypeptide is overexpressed (e.g., overexpressed in the presence of the target nucleic acid). In some embodiments, the FEN is a fusion protein comprising an FEN domain fused to a protein of the present invention and/or a CRISPR-Cas effector protein and/or wherein the Dna2 polypeptide is a fusion protein comprising an Dna2 domain fused to a protein of the present invention and/or a CRISPR-Cas effector protein. In some embodiments, a method of the present invention includes a step of contacting a target nucleic acid with a first CRISPR-Cas effector protein and a second CRISPR-Cas effector protein, optionally wherein the first and/or second CRISPR-Cas effector protein is a protein of the present invention. In some embodiments, the first CRISPR-Cas effector protein nicks or cuts a first site on the first strand of a double stranded target nucleic acid. In some embodiments, the nicking or cut site is located about 10 to about 125 base pairs upstream or downstream, e.g., 5′ or 3′, from a second site on the second strand of the target nucleic acid that has been nicked by a second CRISPR-Cas effector protein.

[0199] In some embodiments, a method of the present invention has increased efficiency in modifying a target nucleic acid compared to the efficiency of a control method (e.g., a method that uses a protein of SEQ ID NO:386, a method that uses a protein of SEQ ID NO:346, and/or compared to a protein of any one of SEQ ID NOs:39-65 and is performed under the same conditions). A method of the present invention may generate increased indels and/or increased levels of modification (e.g., precise modifications) compared to a control method.

[0200] In some embodiments, a complex and/or method of the present invention may include a complex and/or method as described in U.S. Patent Application Publication No. 2021/0130835 and/or in U.S. Patent Application Publication No. 2022/0145334, the contents of each of which are incorporated herein by reference in their entirety.

[0201] In some embodiments, an editing system of the present invention is used in prime editing. “Prime editing” and grammatical variants thereof as used herein refer to a nucleic acid editing technology that uses a Cas9 nickase domain fused to a reverse transcriptase and modifies a target nucleic acid without a double strand break or a donor DNA template. In Prime editing, the Cas9 nickase domain cuts the non-complementary strand of DNA upstream of the PAM site, thereby providing a 3′ flap that is extended with the extension including a modification. Further details on Prime editing can be found in Anzalone et al. (2019) Nature 576, 149-157 and/or U.S. Patent Application Publication No. 2021/0147862, the contents of each of which are incorporated herein by reference in their entirety. In some embodiments, a protein of the present invention is used in place of a Cas9 nickase domain in a prime editing composition and/or method.

[0202] In some embodiments, an editing system of the present invention utilizes the Redraw editing system. Further details on the Redraw editing system can be found in U.S. Patent Application Publication No. 2021/0130835 and/or in U.S. Patent Application Publication No. 2022/0145334, the contents of each of which are incorporated herein by reference in their entirety. In some embodiments, a protein of the present invention is used as or in place of a CRISPR-Cas effector protein in a Redraw editing composition, system, and/or method.

[0203] As described herein, polypeptides of the present invention, nucleic acids, expression cassettes, and/or vectors of the present invention may be codon optimized for expression in an organism. An organism useful with this invention may be any organism or cell thereof for which nucleic acid modification may be useful. An organism can include, but is not limited to, any animal (e.g., a mammal), any plant, any fungus, any archaeon, or any bacterium. In some embodiments, the organism may be a plant or cell thereof. In some embodiments, the organism is an animal such as a mammal (e.g., a human).

[0204] The target nucleic acid may be a genomic sequence from any organism (e.g., eukaryote such as a mammal or a plant). In some embodiments, the target nucleic acid is a genomic sequence from a model organism such as, but not limited to, Escherichia coli, an immortalized human cell line (e.g., HEK293, HeLa, etc.), Caenorhabditis elegans, and/or Drosophila Melanogaster. In some embodiments, the target nucleic acid is a genomic sequence from a non-model organism. Exemplary non-model organisms include, but are not limited to crop plants (e.g., fruit crop plants, vegetable crop plants, and/or field crop plants) and/or animals such as humans, primates and/or mice. In some embodiments, the non-model organism is a crop plant such as corn, soybean, wheat, or canola. In some embodiments, the non-model organism is an animal for testing and/or use of a human therapeutic.

[0205] A target nucleic acid of any plant or plant part may be modified using the nucleic acid constructs of the invention. Any plant (or groupings of plants, for example, into a genus or higher order classification) may be modified using a polypeptide of the present invention including an angiosperm, a gymnosperm, a monocot, a dicot, a C3, C4, CAM plant, a bryophyte, a fern and/or fern ally, a microalgae, and/or a macroalgae. A plant and/or plant part useful with this invention may be a plant and/or plant part of any plant species/variety/cultivar. The term “plant part,” as used herein, includes but is not limited to, embryos, pollen, ovules, seeds, leaves, stems, shoots, flowers, branches, fruit, kernels, ears, cobs, husks, stalks, roots, root tips, anthers, plant cells including plant cells that are intact in plants and/or parts of plants, plant protoplasts, plant tissues, plant cell tissue cultures, plant calli, plant clumps, and the like. As used herein, “shoot” refers to the above ground parts including the leaves and stems. Further, as used herein, “plant cell” refers to a structural and physiological unit of the plant, which comprises a cell wall and also may refer to a protoplast. A plant cell can be in the form of an isolated single cell or can be a cultured cell or can be a part of a higher-organized unit such as, for example, a plant tissue or a plant organ.

[0206] Non-limiting examples of plants useful with the present invention include turf grasses (e.g., bluegrass, bentgrass, ryegrass, fescue), feather reed grass, tufted hair grass, miscanthus, arundo, switchgrass, vegetable crops, including artichokes, kohlrabi, arugula, leeks, asparagus, lettuce (e.g., head, leaf, romaine), malanga, melons (e.g., muskmelon, watermelon, crenshaw, honeydew, cantaloupe), cole crops (e.g., brussels sprouts, cabbage, cauliflower, broccoli, collards, kale, Chinese cabbage, bok choy), cardoni, carrots, napa, okra, onions, celery, parsley, chick peas, parsnips, chicory, peppers, potatoes, cucurbits (e.g., marrow, cucumber, zucchini, squash, pumpkin, honeydew melon, watermelon, cantaloupe), radishes, dry bulb onions, rutabaga, eggplant, salsify, escarole, shallots, endive, garlic, spinach, green onions, squash, greens, beet (sugar beet and fodder beet), sweet potatoes, chard, horseradish, tomatoes, turnips, and spices; a fruit crop such as apples, apricots, cherries, nectarines, peaches, pears, plums, prunes, cherry, quince, fig, nuts (e.g., chestnuts, pecans, pistachios, hazelnuts, pistachios, peanuts, walnuts, macadamia nuts, almonds, and the like), citrus (e.g., clementine, kumquat, orange, grapefruit, tangerine, mandarin, lemon, lime, and the like), blueberries, black raspberries, boysenberries, cranberries, currants, gooseberries, loganberries, raspberries, strawberries, blackberries, grapes (wine and table), avocados, bananas, kiwi, persimmons, pomegranate, pineapple, tropical fruits, pomes, melon, mango, papaya, and lychee, a field crop plant such as clover, alfalfa, timothy, evening primrose, meadow foam, corn/maize (field, sweet, popcorn), hops, jojoba, buckwheat, safflower, quinoa, wheat, rice, barley, rye, millet, sorghum, oats, triticale, sorghum, tobacco, kapok, a leguminous plant (beans (e.g., green and dried), lentils, peas, soybeans), an oil plant (rape, canola, mustard, poppy, olive, sunflower, coconut, castor oil plant, cocoa bean, groundnut, oil palm), duckweed, Arabidopsis, a fiber plant (cotton, flax, hemp, jute), Cannabis (e.g., Cannabis sativa, Cannabis indica, and Cannabis ruderalis), lauraceae (cinnamon, camphor), or a plant such as coffee, sugar cane, tea, and natural rubber plants; and/or a bedding plant such as a flowering plant, a cactus, a succulent and/or an ornamental plant (e.g., roses, tulips, violets), as well as trees such as forest trees (broad-leaved trees and evergreens, such as conifers; e.g., elm, ash, oak, maple, fir, spruce, cedar, pine, birch, cypress, eucalyptus, willow), as well as shrubs and other nursery stock. In some embodiments, the nucleic acid constructs of the invention and/or expression cassettes and/or vectors encoding the same may be used to modify maize, soybean, wheat, canola, rice, tomato, pepper, sunflower, raspberry, blackberry, black raspberry and/or cherry.

[0207] In some embodiments, the invention provides cells (e.g., plant cells, animal cells, bacterial cells, archaeon cells, and the like) comprising the polypeptides, polynucleotides, nucleic acid constructs, expression cassettes or vectors of the invention.

[0208] The present invention further comprises a kit or kits to carry out the methods of this invention. A kit of this invention can comprise reagents, buffers, and apparatus for mixing, measuring, sorting, labeling, etc., as well as instructions and the like as would be appropriate for modifying a target nucleic acid.

[0209] In some embodiments, the invention provides a kit for comprising one or more polypeptides of the present invention, nucleic acid constructs of the invention, and/or expression cassettes and/or vectors and/or cells comprising the same as described herein, with optional instructions for the use thereof. In some embodiments, a kit may further comprise a guide nucleic acid (corresponding to a protein of the present invention and/or CRISPR-Cas effector protein as provided herein, which may be encoded by a polynucleotide) and/or expression cassettes and/or vectors and or cells comprising the same. In some embodiments, a guide nucleic acid may be provided on the same expression cassette and/or vector as one or more nucleic acid constructs of the invention. In some embodiments, the guide nucleic acid may be provided on a separate expression cassette or vector from that comprising the one or more nucleic acid constructs of the invention.

[0210] Accordingly, in some embodiments, kits are provided comprising a nucleic acid construct comprising (a) a polynucleotide(s) as provided herein and (b) a promoter that drives expression of the polynucleotide(s) of (a). In some embodiments, the kit may further comprise a nucleic acid construct encoding a guide nucleic acid, wherein the construct comprises a cloning site for cloning of a nucleic acid sequence identical or complementary to a target nucleic acid sequence into backbone of the guide nucleic acid.

[0211] In some embodiments, the nucleic acid construct of the invention may be an mRNA that may encode one or more introns within the encoded polynucleotide(s). In some embodiments, the nucleic acid constructs of the invention, and/or an expression cassettes and/or vectors comprising the same, may further encode one or more selectable markers useful for identifying transformants (e.g., a nucleic acid encoding an antibiotic resistance gene, herbicide resistance gene, and the like).

[0212] A polypeptide, polynucleotide, nucleic acid construct, expression cassette, vector, composition, kit, system and/or cell of the present invention may comprise all or a portion of a sequence of one or more of SEQ ID NOs:1-420. In some embodiments, if not present in an amino acid sequence described herein and/or encoded in a nucleotide sequence described herein, the amino acid sequence and/or the nucleotide sequence may further include 1, 2, 3, 4, or 5 additional amino acid(s) or corresponding nucleotides such as a methionine at amino acid residue 1 of the amino acid sequence or the corresponding nucleotides and/or 1, 2, 3, or 4 additional amino acid(s) such as glycine or alanine or the corresponding nucleotides, which may aid in expression or enable the construction or cloning as needed for construction of a plasmid or construct or vector. In some embodiments, if present in an amino acid sequence described herein and/or encoded in a nucleotide sequence described herein, the amino acid sequence and/or the nucleotide sequence may be devoid of 1, 2, 3, 4, or 5 amino acid(s) present at amino acid residues 1-5 at the N-terminus of the amino acid sequence or corresponding nucleotides such as a methionine at amino acid residue 1 of the amino acid sequence or the corresponding nucleotides and/or 1, 2, 3, or 4 additional amino acid(s) such as glycine or alanine or the corresponding nucleotides, which may aid in expression or enable the construction or cloning as needed for construction of a plasmid or construct or vector. In some embodiments, a polypeptide, polynucleotide, nucleic acid construct, expression cassette, vector, composition, kit, system and/or cell of the present invention may comprise at least about 20%, 25%, 30%, 35%, 40%, 45%, 50%, 55%, 60%, 65%, 70%, 75%, 80%, 85%, 90%, 95%, 96%, 97%, 98%, 99%, or more consecutive amino acids or nucleotides of a sequence of one or more of SEQ ID NOs:1-420.

[0213] The invention will now be described with reference to the following examples. It should be appreciated that these examples are not intended to limit the scope of the claims to the invention, but are rather intended to be exemplary of certain embodiments. Any variations in the exemplified methods that occur to the skilled artisan are intended to fall within the scope of the invention.

### EXAMPLES

### Example 1

[0214] Proteins comprising an amino acid sequence of one of SEQ ID NOs:356-385 were generated and evaluated for their effect on nuclease editing. Each protein was transformed into soybean and/or corn using a transformation vector that also included a guide nucleic acid with a sequence targeting a specific gene. Enzyme function for the proteins was determined by measuring the frequency of editing the target genes. Editing was evaluated by sequencing plants that were recovered from the transformation and all proteins demonstrated some level of editing activity. Data for a subset of the tested proteins is provided in Table 1. In Table 1, the average fold changes at the 1% and 10% editing thresholds for each protein were calculated as follows: for each spacer, fold change was calculated by dividing the percentage of plants that showed a single edit at or above a given threshold when edited with the protein by the average percentage edited with the enzyme comprising a sequence of SEQ ID NO:355. In cases where one of the samples showed no (0%) editing at a given threshold, the editing percentage for calculation purposes was taken to be the lower of either the lowest nonzero editing percentage observed for that spacer across all mutants or 1% editing. The average fold change was then calculated as the geometric average of fold changes for all spacers with data available for that protein. The percentage of spacers improved for the 1% and 10% threshold indicates the percentage of tested spacers for which the protein showed a greater percentage of edited plants than the enzyme comprising a sequence of SEQ ID NO:355. Proteins having a sequence of SEQ ID NO:360 (E159R mutant relative to SEQ ID NO:386), SEQ ID NO:361 (N160R mutant relative to SEQ ID NO:386), SEQ ID NO:357 (T152R mutant relative to SEQ ID NO:386), and SEQ ID NO:358 (D156R mutant relative to SEQ ID NO:386) demonstrated a greater than two-fold improvement in activity relative to SEQ ID NO:386.

TABLE 1
Activity data.

| Tested proteins | | | | |
|---|---|---|---|---|
| (mutation | | | | |
| relative to | % spacers | % spacers | Avg. fold | Avg. fold |
| SEQ ID | improved | improved | change | change |
| NO: 386) | (1%) | (10%) | (1%) | (10%) |
| E159R - SEQ ID | 60% | 100% | 1.63 | 2.78 |
| NO: 360 | | | | |
| T152R - SEQ ID | 75% | 75% | 2.14 | 2.70 |
| NO: 357 | | | | |
| D156R - SEQ ID | 80% | 80% | 1.70 | 2.63 |
| NO: 358 | | | | |
| N160R - SEQ ID | 80% | 100% | 1.51 | 2.43 |
| NO: 361 | | | | |
| E1129R - SEQ ID | 80% | 80% | 1.85 | 1.64 |
| NO: 382 | | | | |
| S1133R - SEQ ID | 80% | 60% | 1.64 | 1.58 |
| NO: 385 | | | | |
| K662R - SEQ ID | 80% | 60% | 1.81 | 1.26 |
| NO: 375 | | | | |
| N1043R - SEQ ID | 20% | 60% | 0.94 | 1.66 |
| NO: 376 | | | | |
| K272R - SEQ ID | 60% | 60% | 1.15 | 1.45 |
| NO: 370 | | | | |
| S14R - SEQ ID | 80% | 40% | 1.79 | 1.18 |
| NO: 356 | | | | |
| K1096R - SEQ ID | 60% | 60% | 1.41 | 0.95 |
| NO: 380 | | | | |

### Example 2

[0215] Proteins including two or more arginines at various amino acid residues relative to SEQ ID NO:386 were generated and evaluated by transforming the proteins into soybean using a transformation vector that includes a guide nucleic acid that targets a specific gene. Enzyme function of each protein was determined by measuring the frequency of editing the target genes as described in Example 1 and the data is presented in Table 2. The protein having the combination of mutations of K662R and E1129R showed improved editing efficiency compared to the wild type control (SEQ ID NO:386). All of the proteins tested showed some level of editing activity; however, the K662R+E1129R mutant was superior to all of the other mutants tested.

TABLE 2
Activity data in soybean. Multiple guide sequences
were tested with each protein and representative
data for one guide sequence is presented.

| Tested proteins | | | | | |
|---|---|---|---|---|---|
| (mutation | | | | | |
| relative to | # of | # | | % spacers | % spacers |
| SEQ ID | samples | edited | # | improved | improved |
| NO: 386) | reported | (>1%) | edited >10% | (1%) | (10%) |
| WT control | 29 | 14 | 8 | 48.28 | 27.59 |
| (for the below | | | | | |
| row) - SEQ ID | | | | | |
| NO: 386 | | | | | |
| E159R + | 29 | 14 | 6 | 48.28 | 20.69 |
| K662R + | | | | | |
| E1129R - SEQ | | | | | |
| ID NO: 417 | | | | | |
| WT control | 40 | 15 | 9 | 37.50 | 22.50 |
| (for the | | | | | |
| following three | | | | | |
| rows) - SEQ ID | | | | | |
| NO: 386 | | | | | |
| E1129R - SEQ | 40 | 27 | 17 | 67.50 | 42.50 |
| ID NO: 382 | | | | | |
| K662R - SEQ | 37 | 22 | 11 | 59.46 | 29.73 |
| ID NO: 375 | | | | | |
| K662R + | 39 | 26 | 17 | 66.67 | 43.59 |
| E1129R - | | | | | |
| SEQ ID | | | | | |
| NO: 418 | | | | | |

### Example 3: Alternate Base Enzyme With Mutations

[0216] The combination of mutations E159+K662+E1129 and K662+E1129 were evaluated in an alternative base enzyme (SEQ ID NO:346) in soybean as described in Example 2 and the data is presented in Table 3. This demonstrates that the mutations can be used in various base enzymes such as SEQ ID NO:254-355 or 386 and can provide alternate editing enzymes with modified functionality compared to the base enzyme (e.g., one of SEQ ID NO:254-355 or 386).

TABLE 3
Activity data.

| Tested proteins | | | | | |
|---|---|---|---|---|---|
| (mutation | | | | | |
| relative to | # of | # | | % spacers | % spacers |
| SEQ ID | samples | edited | # | improved | improved |
| NO: 346) | reported | (>1%) | edited >10% | (1%) | (10%) |
| RR (control) | 37 | 16 | 4 | 43.24 | 10.81 |
| (SEQ ID | | | | | |
| NO: 346) | | | | | |
| E159R + | 29 | 6 | 3 | 20.69 | 10.34 |
| K662R + | | | | | |
| E1129R - SEQ | | | | | |
| ID NO: 419 | | | | | |
| K662R + | 40 | 17 | 5 | 42.50 | 12.50 |
| E1129R - | | | | | |
| SEQ ID | | | | | |
| NO: 420 | | | | | |

[0217] The foregoing is illustrative of the present invention, and is not to be construed as limiting thereof. The invention is defined by the following claims, with equivalents of the claims to be included therein.

The application's sequence listing, which the Patent Office published only in electronic form, follows.

SEQUENCE LISTING (420 sequences)

SEQ ID NO: 1 - protein, 36 aa, Synthetic construct
EKSKNDRSKPQPSDDRDRQPPSGEDYPEWKAPGEYE

SEQ ID NO: 2 - protein, 34 aa, Synthetic construct
QEPKPQDQSSEVPPPPGSQKPGTKEPHDSKSSGP

SEQ ID NO: 3 - protein, 34 aa, Synthetic construct
PDNSSGQKLQLPQPSDKPQDSREKSDSLPSDKRD

SEQ ID NO: 4 - protein, 36 aa, Synthetic construct
PDNSTLQTLQLPQPTPSSTDTQQTSDTDPEDTTDVI

SEQ ID NO: 5 - protein, 30 aa, Synthetic construct
STSQSDGSSVPADIDQSSDSDQSSSQGQPG

SEQ ID NO: 6 - protein, 14 aa, Synthetic construct
AKPDDESQKPPQDD

SEQ ID NO: 7 - protein, 14 aa, Synthetic construct
LQLEPGPTTPEYPI

SEQ ID NO: 8 - protein, 14 aa, Synthetic construct
IQLPPSDTTPENPI

SEQ ID NO: 9 - protein, 12 aa, Synthetic construct
ESNDNSQVPPSL

SEQ ID NO: 10 - protein, 10 aa, Synthetic construct
SEQQEYPGSG

SEQ ID NO: 11 - protein, 10 aa, Synthetic construct
NNSEQQENPA

SEQ ID NO: 12 - protein, 12 aa, Synthetic construct
STDGSGQPKHKP

SEQ ID NO: 13 - protein, 20 aa, Synthetic construct
PKPSSESGERYEQQPEPPPP

SEQ ID NO: 14 - protein, 16 aa, Synthetic construct
KGGGGEPDEKRPSQSS

SEQ ID NO: 15 - protein, 14 aa, Synthetic construct
YAGGTPKEPPPPNS

SEQ ID NO: 16 - protein, 14 aa, Synthetic construct
PLVAGGTPFEPPPP

SEQ ID NO: 17 - protein, 14 aa, Synthetic construct
PQPDERSQIPDNKE

SEQ ID NO: 18 - protein, 10 aa, Synthetic construct
YTDEKPLPRS

SEQ ID NO: 19 - protein, 12 aa, Synthetic construct
SHPPQEPPQSNL

SEQ ID NO: 20 - protein, 16 aa, Synthetic construct
SESPSKQQPEPKSSKG

SEQ ID NO: 21 - protein, 16 aa, Synthetic construct
SESPTNQQPEPQWTTD

SEQ ID NO: 22 - protein, 16 aa, Synthetic construct
GGSKGPPPSPPPPQPE

SEQ ID NO: 23 - protein, 16 aa, Synthetic construct
GPLPAPPPQPPPPQPN

SEQ ID NO: 24 - protein, 14 aa, Synthetic construct
RPLPHDNNKQDYSK

SEQ ID NO: 25 - protein, 61 aa, Synthetic construct
SGGSGGSGGSGGSGGSGGSGGSGGSGGSGGSGGSGGSGGSGGSGGSGGSGGSGGSGGSGGS

SEQ ID NO: 26 - protein, 4 aa, Synthetic construct
SGGS

SEQ ID NO: 27 - protein, 100 aa, Synthetic construct
GGGGSGGGGSGGGGSGGGGSGGGGSGGGGSGGGGSGGGGSGGGGSGGGGSGGGGSGGGGSGGGGSGGGGSGGGGSGGGGSGGGGSGGGGSGGGGSGGGGS

SEQ ID NO: 28 - protein, 10 aa, Synthetic construct
SGGSGGSGGS

SEQ ID NO: 29 - protein, 16 aa, Synthetic construct
SGSETPGTSESATPES

SEQ ID NO: 30 - protein, 32 aa, Synthetic construct
SGGSSGGSSGSETPGTSESATPESSGGSSGGS

SEQ ID NO: 31 - protein, 4 aa, Synthetic construct
GSSG

SEQ ID NO: 32 - protein, 6 aa, Synthetic construct
GSSGSS

SEQ ID NO: 33 - protein, 8 aa, Synthetic construct
GSSGSSGS

SEQ ID NO: 34 - protein, 60 aa, Synthetic construct
GSSGSSGSSGSSGSSGSSGSSGSSGSSGSSGSSGSSGSSGSSGSSGSSGSSGSSGSSGSS

SEQ ID NO: 35 - protein, 62 aa, Synthetic construct
GSSGSSGSSGSSGSSGSSGSSGSSGSSGSSGSSGSSGSSGSSGSSGSSGSSGSSGSSGSSGS

SEQ ID NO: 36 - protein, 61 aa, Synthetic construct
GSSGSSGSSGSSGSSGSSGSSGSSGSSGSSGSSGSSGSSGSSGSSGSSGSSGSSGSSGSSG

SEQ ID NO: 37 - DNA, 1592 bp, Medicago truncatula
  source 1..1592: mol_type = genomic DNA
actgttaataatttttaaacgtcagcgcactaaaaaaacgaaaagacggacacgtgaaaataaaaaacacacactagtttatgacgcaatactattttacttatgatttgggtacattagacaaaaccgtgaaagagatgtatcagctatgaaacctgtatacttcaatacagagacttactcatatcggatacgtacgcacgaagtatcatattaattattttaatttttaataaatattttatcggatacttatgtgatactctacatatacacaaggatatttctaagatactttatagatacgtatcctagaaaaacatgaagagtaaaaaagtgagacaatgttgtaaaaattcattataaatgtatatgattcaattttagatatgcatcagtataattgattctcgatgaaacacttaaaattatatttcttgtggaagaacgtagcgagagaggtgattcagttagacaacattaaataaaattaatgttaagttcttttaatgatgtttctctcaatatcacatcatatgaaaatgtaatatgatttataagaaaatttttaaaaaatttattttaataatcacatgtactattttttaaaaattgtatcttttataataatacaataataaagagtaatcagtgttaatttttcttcaaatataagttttattataaatcattgttaacgtatcataagtcattaccgtatcgtatcttaatttttttttaaaaaccgctaattcacgtacccgtattgtattgtacccgcacctgtatcacaatcgatcttagttagaagaattgtctcgaggcggtgcaagacagcatataatagacgtggactctcttataccaaacgttgtcgtatcacaaagggttaggtaacaagtcacagtttgtccacgtgtcacgttttaattggaagaggtgccgttggcgtaatataacagccaatcgatttttgctataaaagcaaatcaggtaaactaaacttcttcattcttttcttccccatcgctacaaaaccggttcctttggaaaagagattcattcaaacctagcacccaattccgtttcaaggtataatctactttctattcttcgattattttattattattagctactatcgtttaatcgatcttttcttttgatccgtcaaatttaaattcaattagggttttgttcttttctttcatctgattgaaatccttctgaattgaaccgtttacttgattttactgtttattgtatgatttaatcctttgtttttcaaagacagtctttagattgtgattaggggttcatataaatttttagatttggatttttgtattgtatgattcaaaaaatacgtcctttaattagattagtacatggatattttttacccgatttattgattgtcagggagaatttgatgagcaagtttttttgatgtctgttgtaaattgaattgattataattgctgatctgctgcttccagttttcataacccatattcttttaaccttgttgtacacacaatgaaaaattggtgattgattcatttgtttttctttgttttggattatacagg

SEQ ID NO: 38 - DNA, 2000 bp, Zea mays
  source 1..2000: mol_type = genomic DNA
gtcgtgcccctctctagagataaagagcattgcatgtctaaagtataaaaaattaccacatatttttttgtcacacttatttgaagtgtagtttatctatctctatacatatatttaaacttcactctacaaataatatagtctataatactaaaataatattagtgttttagaggatcatataaataaactgctagacatggtctaaaggataattgaatattttgacaatctacagttttatctttttagtgtgcatgtgatctctctgttttttttgcaaatagcttgacctatataatacttcatccattttattagtacatccatttaggatttagggttgatggtttctatagactaatttttagtacatccattttattctttttagtctctaaattttttaaaactaaaactctattttagttttttatttaataatttagatataaaatgaaataaaataaattgactacaaataaaacaaataccctttaagaaataaaaaaactaagcaaacatttttcttgtttcgagtagataatgacaggctgttcaacgccgtcgacgagtctaacggacaccaaccagcgaaccagcagcgtcgcgtcgggccaagcgaagcagacggcacggcatctctgtagctgcctctggacccctctcgagagttccgctccaccgttggacttgctccgctgtcggcatccagaaattgcgtggcggagcggcagacgtgaggcggcacggcaggcggcctcttcctcctctcacggcaccggcagctacgggggattcctttcccaccgctccttcgctttcccttcctcgcccgccgtaataaatagacaccccctccacaccctctttccccaacctcgtgttcgttcggagcgcacacacacgcaaccagatctcccccaaatccagccgtcggcacctccgcttcaaggtacgccgctcatcctccccccccccctctctctaccttctctagatcggcgatccggtccatggttagggcccggtagttctacttctgttcatgtttgtgttagagcaaacatgttcatgttcatgtttgtgatgatgtggtctggttgggcggtcgttctagatcggagtaggatactgtttcaagctacctggtggatttattaattttgtatctgtatgtgtgtgccatacatcttcatagttacgagtttaagatgatggatggaaatatcgatctaggataggtatacatgttgatgcgggttttactgatgcatatacagagatgctttttttctcgcttggttgtgatgatatggtctggttgggcggtcgttctagatcggagtagaatactgtttcaaactacctggtggatttattaaaggataaagggtcgttctagatcggagtagaatactgtttcaaactacctggtggatttattaaaggatctgtatgtatgtgcctacatcttcatagttacgagtttaagatgatggatggaaatatcgatctaggataggtatacatgttgatgcgggttttactgatgcatatacagagatgctttttttcgcttggttgtgatgatgtggtctggttgggcggtcgttctagatcggagtagaatactgtttcaaactacctggtggatttattaattttgtatctttatgtgtgtgccatacatcttcatagttacgagtttaagatgatggatggaaatattgatctaggataggtatacatgttgatgtgggttttactgatgcatatacatgatggcatatgcggcatctattcatatgctctaaccttgagtacctatctattataataaacaagtatgttttataattattttgatcttgatatacttggatgatggcatatgcagcagctatatgtggattttttagccctgccttcatacgctatttatttgcttggtactgtttcttttgtccgatgctcaccctgttgtttggtgatacttc

SEQ ID NO: 39 - protein, 1228 aa, Synthetic construct
MSKLEKFTNCYSLSKTLRFKAIPVGKTQENIDNKRLLVEDEKRAEDYKGVKKLLDRYYLSFINDVLHSIKLKNLNNYISLFRKKTRTEKENKELENLEINLRKEIAKAFKGNEGYKSLFKKDIIETILPEFLDDKDEIALVNSFNGFTTAFTGFFDNRENMFSEEAKSTSIAFRCINENLTRYISNMDIFEKVDAIFDKHEVQEIKEKILNSDYDVEDFFEGEFFNFVLTQEGIDVYNAIIGGFVTESGEKIKGLNEYINLYNQKTKQKLPKFKPLYKQVLSDRESLSFYGEGYTSDEEVLEVFRNTLNKNSEIFSSIKKLEKLFKNFDEYSSAGIFVKNGPAISTISKDIFGEWNVIRDKWNAEYDDIHLKKKAVVTEKYEDDRRKSFKKIGSFSLEQLQEYADADLSVVEKLKEIIIQKVDEIYKVYGSSEKLFDADFVLEKSLKKNDAVVAIMKDLLDSVKSFENYIKAFFGEGKETNRDESFYGDFVLAYDILLKVDHIYDAIRNYVTQKPYSKDKFKLYFQNPQFMGGWDKDKETDYRATILRYGSKYYLAIMDKKYAKCLQKIDKDDVNGNYEKINYKLLPGPNKMLPKVFFSKKWMAYYNPSEDIQKIYKNGTFKKGDMFNLNDCHKLIDFFKDSISRYPKWSNAYDFNFSETEKYKDIAGFYREVEEQGYKVSFESASKKEVDKLVEEGKLYMFQIYNKDFSDKSHGTPNLHTMYFKLLFDENNHGQIRLSGGAELFMRRASLKKEELVVAPANSPIANKNPDNPKKTTTLSYDVYKDKRFSEDQYELHIPIAINKCPKNIFKINTEVRVLLKHDDNPYVIGIARGERNLLYIVVVDGKGNIVEQYSLNEIINNFNGIRIKTDYHSLLDKKEKERFEARQNWTSIENIKELKAGYISQVVHKICELVEKYDAVIALEDLNSGFKNSRVKVEKQVYQKFEKMLIDKLNYMVDKKSNPCATGGALKGYQITNKFESFKSMSTQNGFIFYIPAWLTSKIDPSTGFVNLLKTKYTSIADSKKFISSFDRIMYVPEEDLFEFALDYKNFSRTDADYIKKWKLYSYGNRIRIFRNPKKNNVFDWEEVCLTSAYKELFNKYGINYQQGDIRALLCEQSDKAFYSSFMALMSLMLQMRNSITGRTDVDFLISPVKNSDGIFYDSRNYEAQENAILPKNADANGAYNIARKVLWAIGQFKKAEDEKLDKVKIAISNKEWLEYAQTSVKH

SEQ ID NO: 40 - protein, 1227 aa, Synthetic construct
SKLEKFTNCYSLSKTLRFKAIPVGKTQENIDNKRLLVEDEKRAEDYKGVKKLLDRYYLSFINDVLHSIKLKNLNNYISLFRKKTRTEKENKELENLEINLRKEIAKAFKGNEGYKSLFKKDIIETILPEFLDDKDEIALVNSFNGFTTAFTGFFDNRENMFSEEAKSTSIAFRCINENLTRYISNMDIFEKVDAIFDKHEVQEIKEKILNSDYDVEDFFEGEFFNFVLTQEGIDVYNAIIGGFVTESGEKIKGLNEYINLYNQKTKQKLPKFKPLYKQVLSDRESLSFYGEGYTSDEEVLEVFRNTLNKNSEIFSSIKKLEKLFKNFDEYSSAGIFVKNGPAISTISKDIFGEWNVIRDKWNAEYDDIHLKKKAVVTEKYEDDRRKSFKKIGSFSLEQLQEYADADLSVVEKLKEIIIQKVDEIYKVYGSSEKLFDADFVLEKSLKKNDAVVAIMKDLLDSVKSFENYIKAFFGEGKETNRDESFYGDFVLAYDILLKVDHIYDAIRNYVTQKPYSKDKFKLYFQNPQFMGGWDKDKETDYRATILRYGSKYYLAIMDKKYAKCLQKIDKDDVNGNYEKINYKLLPGPNKMLPKVFFSKKWMAYYNPSEDIQKIYKNGTFKKGDMFNLNDCHKLIDFFKDSISRYPKWSNAYDFNFSETEKYKDIAGFYREVEEQGYKVSFESASKKEVDKLVEEGKLYMFQIYNKDFSDKSHGTPNLHTMYFKLLFDENNHGQIRLSGGAELFMRRASLKKEELVVHPANSPIANKNPDNPKKTTTLSYDVYKDKRFSEDQYELHIPIAINKCPKNIFKINTEVRVLLKHDDNPYVIGIARGERNLLYIVVVDGKGNIVEQYSLNEIINNFNGIRIKTDYHSLLDKKEKERFEARQNWTSIENIKELKAGYISQVVHKICELVEKYDAVIALEDLNSGFKNSRVKVEKQVYQKFEKMLIDKLNYMVDKKSNPCATGGALKGYQITNKFESFKSMSTQNGFIFYIPAWLTSKIDPSTGFVNLLKTKYTSIADSKKFISSFDRIMYVPEEDLFEFALDYKNFSRTDADYIKKWKLYSYGNRIRIFRNPKKNNVFDWEEVCLTSAYKELFNKYGINYQQGDIRALLCEQSDKAFYSSFMALMSLMLQMRNSITGRTDVDFLISPVKNSDGIFYDSRNYEAQENAILPKNADANGAYNIARKVLWAIGQFKKAEDEKLDKVKIAISNKEWLEYAQTSVKH

SEQ ID NO: 41 - protein, 1228 aa, Synthetic construct
MSKLEKFTNCYSLSKTLRFKAIPVGKTQENIDNKRLLVEDEKRAEDYKGVKKLLDRYYLSFINDVLHSIKLKNLNNYISLFRKKTRTEKENKELENLEINLRKEIAKAFKGNEGYKSLFKKDIIETILPEFLDDKDEIALVNSFNGFTTAFTGFFDNRENMFSEEAKSTSIAFRCINENLTRYISNMDIFEKVDAIFDKHEVQEIKEKILNSDYDVEDFFEGEFFNFVLTQEGIDVYNAIIGGFVTESGEKIKGLNEYINLYNQKTKQKLPKFKPLYKQVLSDRESLSFYGEGYTSDEEVLEVFRNTLNKNSEIFSSIKKLEKLFKNFDEYSSAGIFVKNGPAISTISKDIFGEWNVIRDKWNAEYDDIHLKKKAVVTEKYEDDRRKSFKKIGSFSLEQLQEYADADLSVVEKLKEIIIQKVDEIYKVYGSSEKLFDADFVLEKSLKKNDAVVAIMKDLLDSVKSFENYIKAFFGEGKETNRDESFYGDFVLAYDILLKVDHIYDAIRNYVTQKPYSKDKFKLYFQNPQFMGGWDKDKETDYRATILRYGSKYYLAIMDKKYAKCLQKIDKDDVNGNYEKINYKLLPGPNKMLPKVFFSKKWMAYYNPSEDIQKIYKNGTFKKGDMFNLNDCHKLIDFFKDSISRYPKWSNAYDFNFSETEKYKDIAGFYREVEEQGYKVSFESASKKEVDKLVEEGKLYMFQIYNKDFSDKSHGTPNLHTMYFKLLFDENNHGQIRLSGGAELFMRRASLKKEELVVHPANSPIANKNPDNPKKTTTLSYDVYKDKRFSEDQYELHIPIAINKCPKNIFKINTEVRVLLKHDDNPYVIGIARGERNLLYIVVVDGKGNIVEQYSLNEIINNFNGIRIKTDYHSLLDKKEKERFEARQNWTSIENIKELKAGYISQVVHKICELVEKYDAVIALEDLNSGFKNSRVKVEKQVYQKFEKMLIDKLNYMVDKKSNPCATGGALKGYQITNKFESFKSMSTQNGFIFYIPAWLTSKIDPSTGFVNLLKTKYTSIADSKKFISSFDRIMYVPEEDLFEFALDYKNFSRTDADYIKKWKLYSYGNRIRIFRNPKKNNVFDWEEVCLTSAYKELFNKYGINYQQGDIRALLCEQSDKAFYSSFMALMSLMLQMRNSITGRTDVDFLISPVKNSDGIFYDSRNYEAQENAILPKNADANGAYNIARKVLWAIGQFKKAEDEKLDKVKIAISNKEWLEYAQTSVKH

SEQ ID NO: 42 - protein, 1307 aa, Acidaminococcus sp.
MTQFEGFTNLYQVSKTLRFELIPQGKTLKHIQEQGFIEEDKARNDHYKELKPIIDRIYKTYADQCLQLVQLDWENLSAAIDSYRKEKTEETRNALIEEQATYRNAIHDYFIGRTDNLTDAINKRHAEIYKGLFKAELFNGKVLKQLGTVTTTEHENALLRSFDKFTTYFSGFYENRKNVFSAEDISTAIPHRIVQDNFPKFKENCHIFTRLITAVPSLREHFENVKKAIGIFVSTSIEEVFSFPFYNQLLTQTQIDLYNQLLGGISREAGTEKIKGLNEVLNLAIQKNDETAHIIASLPHRFIPLFKQILSDRNTLSFILEEFKSDEEVIQSFCKYKTLLRNENVLETAEALFNELNSIDLTHIFISHKKLETISSALCDHWDTLRNALYERRISELTGKITKSAKEKVQRSLKHEDINLQEIISAAGKELSEAFKQKTSEILSHAHAALDQPLPTTLKKQEEKEILKSQLDSLLGLYHLLDWFAVDESNEVDPEFSARLTGIKLEMEPSLSFYNKARNYATKKPYSVEKFKLNFQMPTLASGWDVNKEKNNGAILFVKNGLYYLGIMPKQKGRYKALSFEPTEKTSEGFDKMYYDYFPDAAKMIPKCSTQLKAVTAHFQTHTTPILLSNNFIEPLEITKEIYDLNNPEKEPKKFQTAYAKKTGDQKGYREALCKWIDFTRDFLSKYTKTTSIDLSSLRPSSQYKDLGEYYAELNPLLYHISFQRIAEKEIMDAVETGKLYLFQIYNKDFAKGHHGKPNLHTLYWTGLFSPENLAKTSIKLNGQAELFYRPKSRMKRMAHRLGEKMLNKKLKDQKTPIPDTLYQELYDYVNHRLSHDLSDEARALLPNVITKEVSHEIIKDRRFTSDKFFFHVPITLNYQAANSPSKFNQRVNAYLKEHPETPIIGIDRGERNLIYITVIDSTGKILEQRSLNTIQQFDYQKKLDNREKERVAARQAWSVVGTIKDLKQGYLSQVIHEIVDLMIHYQAVVVLENLNFGFKSKRTGIAEKAVYQQFEKMLIDKLNCLVLKDYPAEKVGGVLNPYQLTDQFTSFAKMGTQSGFLFYVPAPYTSKIDPLTGFVDPFVWKTIKNHESRKHFLEGFDFLHYDVKTGDFILHFKMNRNLSFQRGLPGFMPAWDIVFEKNETQFDAKGTPFIAGKRIVPVIENHRFTGRYRDLYPANELIALLEEKGIVFRDGSNILPKLLENDDSHAIDTMVALIRSVLQMRNSNAATGEDYINSPVRDLNGVCFDSRFQNPEWPMDADANGAYHIALKGQLLLNHLKESKDLKLQNGISNQDWLAYIQELRN

SEQ ID NO: 43 - protein, 1241 aa, Butyrivibrio proteoclasticus
MLLYENYTKRNQITKSLRLELRPQGKTLRNIKELNLLEQDKAIYALLERLKPVIDEGIKDIARDTLKNCELSFEKLYEHFLSGDKKAYAKESERLKKEIVKTLIKNLPEGIGKISEINSAKYLNGVLYDFIDKTHKDSEEKQNILSDILETKGYLALFSKFLTSRITTLEQSMPKRVIENFEIYAANIPKMQDALERGAVSFAIEYESICSVDYYNQILSQEDIDSYNRLISGIMDEDGAKEKGINQTISEKNIKIKSEHLEEKPFRILKQLHKQILEEREKAFTIDHIDSDEEVVQVTKEAFEQTKEQWENIKKINGFYAKDPGDITLFIVVGPNQTHVLSQLIYGEHDRIRLLLEEYEKNTLEVLPRRTKSEDARYDKFVNAVPKKVAKESHTFDGLQKMTGDDRLFILYRDELARNYMRIKEAYGTFERDILKSRRGIKGNRDVQESLVSFYDELTKFRSALRIINSGNDEKADPIFYNTFDGIFEKANRTYKAENLCRNYVTKSPADDARIMASCLGTPARLRTHWWNGEENFAINDVAMIRRGDEYYYFVLTPDVKPVDLKTKDETDAQIFVQRKGAKSFLGLPKALFKCILEPYFESPEHKNDKNCVIEEYVSKPLTIDRRAYDIFKNGTFKKTNIGIDGLTEEKFKDDCRYLIDVYKEFIAVYTRYSCFNMSGLKRADEYNDIGEFFSDVDTRLCTMEWIPVSFERINDMVDKKEGLLFLVRSMFLYNRPRKPYERTFIQLFSDSNMEHTSMLLNSRAMIQYRAASLPRRVTHKKGSILVALRDSNGEHIPMHIREAIYKMKNNFDISSEDFIMAKAYLAEHDVAIKKANEDIIRNRRYTEDKFFLSLSYTKNADISARTLDYINDKVEEDTQDSRMAVIVTRNLKDLTYVAVVDEKNNVLEEKSLNEIDGVNYRELLKERTKIKYHDKTRLWQYDVSSKGLKEAYVELAVTQISKLATKYNAVVVVESMSSTFKDKFSFLDEQIFKAFEARLCARMSDLSFNTIKEGEAGSISNPIQVSNNNGNSYQDGVIYFLNNAYTRTLCPDTGFVDVFDKTRLITMQSKRQFFAKMKDIRIDDGEMLFTFNLEEYPTKRLLDRKEWTVKIAGDGSYFDKDKGEYVYVNDIVREQIIPALLEDKAVFDGNMAEKFLDKTAISGKSVELIYKWFANALYGIITKKDGEKIYRSPITGTEIDVSKNTTYNFGKKFMFKQEYRGDGDFLDAFLNYMQAQDIAV

SEQ ID NO: 44 - protein, 1238 aa, Methanoplasma termitum
MNNYDEFTKLYPIQKTIRFELKPQGRTMEHLETFNFFEEDRDRAEKYKILKEAIDEYHKKFIDEHLTNMSLDWNSLKQISEKYYKSREEKDKKVFLSEQKRMRQEIVSEFKKDDRFKDLFSKKLFSELLKEEIYKKGNHQEIDALKSFDKFSGYFIGLHENRKNMYSDGDEITAISNRIVNENFPKFLDNLQKYQEARKKYPEWIIKAESALVAHNIKMDIVFSLEYFNKVLNQEGIQRYNLALGGYVTKSGEKMMGLNDALNLAHQSEKSSKGRIHMTPLFKQILSEKESFSYIPDVFTEDSQLLPSIGGFFAQIENDKDGNIFDRALELISSYAEYDTERIYIRQADINRVSNVIFGEWGTLGGLMREYKADSINDINLERTCKKVDKWLDSKEFALSDVLEAIDRTGNNDAFNEYISKMRTAREKIDAARKEMKFISEKISGDEESIHIIKTLLDSVQQFLHFFNLFKARQDIPLDGAFYAEFDEVHSKLFAIVPLYNKVRNYLTKNNLNTKKIKLNFKNPTLANGWDQNKVYDYASLIFLRDGNYYLGIINPKRKKNIKFEQGSGNGPFYRKMVYKQIPGPNKNLRPVFLTSTKGKKEYKPSKEIIEGYEADKHIRGDKFDLDFCHKLIDFFKESIEKHKDWSKFNFYFSPTESYGDISEFYLDVEKQGYRMHFENISAETIDEYVEKGDLFLFQIYNKDFVKAATGKKDMHTIYWNAAFSPENLQDVVVKLNGEAELFYRDKSDIKEIVHREGEILVNRTYNGRTPVPDKIHKKLTDYHNGRTKDLGEAKEYLDKVRYFKAHYDITKDRRYLNDKIYFHVPLTLNFKANGKKNLNKMVIEKFLSDEKAHIIGIDRGERNLLYYSIIDRSGKIIDQQSLNVIDGFDYREKLNQREIEMKDARQSWNAIGKIKDLKEGYLSKAVHEITKMAIQYNAIVVMEELNYGFKRGRFKVEKQIYQKFENMLIDKMNYLVFKDAPDESPGGVLNAYQLTNPLESFAKLGKQTGILFYVPAAYTSKIDPTTGFVNLFNTSSKTNAQERKEFLQKFESISYSAKDGGIFAFAFDYRKFGTSKTDHKNVWTAYTNGERMRYIKEKKRNELFDPSKEIKEALTSSGIKYDGGQNILPDILRSNNNGLIYTMYSSFIAAIQMRVYDGKEDYIISPIKNSKGEFFRTDPKRRELPIDADANGAYNIALRGELTMRAIAEKFDPDSEKMAKLELKHKDWFEFMQTRGD

SEQ ID NO: 45 - protein, 1281 aa, Eubacterium eligens
MNGNRSIVYREFVGVIPVAKTLRNELRPVGHTQEHIIQNGLIQEDELRQEKSTELKNIMDDYYREYIDKSLSGVTDLDFTLLFELMNLVQSSPSKDNKKALEKEQSKMREQICTHLQSDSNYKNIFNAKLLKEILPDFIKNYNQYDVKDKAGKLETLALFNGFSTYFTDFFEKRKNVFTKEAVSTSIAYRIVHENSLIFLANMTSYKKISEKALDEIEVIEKNNQDKMGDWELNQIFNPDFYNMVLIQSGIDFYNEICGVVNAHMNLYCQQTKNNYNLFKMRKLHKQILAYTSTSFEVPKMFEDDMSVYNAVNAFIDETEKGNIIGKLKDIVNKYDELDEKRIYISKDFYETLSCFMSGNWNLITGCVENFYDENIHAKGKSKEEKVKKAVKEDKYKSINDVNDLVEKYIDEKERNEFKNSNAKQYIREISNIITDTETAHLEYDDHISLIESEEKADEMKKRLDMYMNMYHWAKAFIVDEVLDRDEMFYSDIDDIYNILENIVPLYNRVRNYVTQKPYNSKKIKLNFQSPTLANGWSQSKEFDNNAIILIRDNKYYLAIFNAKNKPDKKIIQGNSDKKNDNDYKKMVYNLLPGANKMLPKVFLSKKGIETFKPSDYIISGYNAHKHIKTSENFDISFCRDLIDYFKNSIEKHAEWRKYEFKFSATDSYSDISEFYREVEMQGYRIDWTYISEADINKLDEEGKIYLFQIYNKDFAENSTGKENLHTMYFKNIFSEENLDKIIKLNGQAELFYRRASVKNPVKHKKDSVLVNKTYKNQLDNGDVVRIPIPDDIYNEIYKMYNGYIKESDLSEAAKEYLDKVEVRTAQKDIVKDYRYTVDKYFIHTPITINYKVTARNNVNDMVVKYIAQNDDIHVIGIDRGERNLIYISVIDSHGNIVKQKSYNILNNYDYKKKLVEKEKTREYARKNWKSIGNIKELKEGYISGVVHEIAMLIVEYNAIIAMEDLNYGFKRGRFKVERQVYQKFESMLINKLNYFASKEKSVDEPGGLLKGYQLTYVPDNIKNLGKQCGVIFYVPAAFTSKIDPSTGFISAFNFKSISTNASRKQFFMQFDEIRYCAEKDMFSFGFDYNNFDTYNITMGKTQWTVYTNGERLQSEFNNARRTGKTKSINLTETIKLLLEDNEINYADGHDIRIDMEKMDEDKKSEFFAQLLSLYKLTVQMRNSYTEAEEQENGISYDKIISPVINDEGEFFDSDNYKESDDKECKMPKDADANGAYCIALKGLYEVLKIKSEWTEDGFDRNCLKLPHAEWLDFIQNKRYE

SEQ ID NO: 46 - protein, 1300 aa, Francisella tularensis
MSIYQEFVNKYSLSKTLRFELIPQGKTLENIKARGLILDDEKRAKDYKKAKQIIDKYHQFFIEEILSSVCISEDLLQNYSDVYFKLKKSDDDNLQKDFKSAKDTIKKQISEYIKDSEKFKNLFNQNLIDAKKGQESDLILWLKQSKDNGIELFKANSDITDIDEALEIIKSFKGWTTYFKGFHENRKVNYSSNDIPTSIIYRIVDDNLPKFLENKAKYESLKDKAPEAINYEQIKKDLAEELTFDIDYKTSEVNQRVFSLDEVFEIANFNNYLNQSGITKFNTIIGGKFVNGENTKRKGINEYINLYSQQINDKTLKKYKMSVLFKQILSDTESKSFVIDKLEDDSDVVTTMQSFYEQIAAFKTVEEKSIKETLSLLFDDLKAQKLDLSKIYFKNDKSLTDLSQQVFDDYSVIGTAVLEYITQQIAPKNLDNPSKKEQELIAKKTEKAKYLSLETIKLALEEFNKHRDIDKQCRFEEILANFAAIPMIFDEIAQNKDNLAQISIKYQNQGKKDLLQASAEDDVKAIKDLLDQTNNLLHKLKIFHISQSEDKANILDKDEHFYLVFEECYFELANIVPLYNKIRNYITQKPYSDEKFKLNFENSTLANGWDKNKEPDNTAILFIKDDKYYLGVMNKKNNKIFDDKAIKENKGEGYKKIVYKLLPGANKMLPKVFFSAKSIKFYNPSEDILRIRNHSTHTKNGSPQKGYEKFEFNIEDCRKFIDFYKQSISKHPEWKDFGFRFSDTQRYNSIDEFYREVENQGYKLTFENISESYIDSVVNQGKLYLFQIYNKDFSAYSKGRPNLHTLYWKALFDERNLQDVVYKLNGEAELFYRKQSIPKKITHPAKEAIANKNKDNPKKESVFEYDLIKDKRFTEDKFFFHCPITINFKSSGANKFNDEINLLLKEKANDVHILSIDRGERHLAYYTLVDGKGNIIKQDTFNIIGNDRMKTNYHDKLAAIEKDRDSARKDWKKINNIKEMKEGYLSQVVHEIAKLVIEYNAIVVFEDLNFGFKRGRFKVEKQVYQKLEKMLIEKLNYLVFKDNEFDKTGGVLRAYQLTAPFETFKKMGKQTGIIYYVPAGFTSKICPVTGFVNQLYPKYESVSKSQEFFSKFDKICYNLDKGYFEFSFDYKNFGDKAAKGKWTIASFGSRLINFRNSDKNHNWDTREVYPTKELEKLLKDYSIEYGHGECIKAAICGESDKKFFAKLTSVLNTILQMRNSKTGTELDYLISPVADVNGNFFDSRQAPKNMPQDADANGAYHIGLKGLMLLGRIKNNQEGKKLNLVIKNEEYFEFVQNRNN

SEQ ID NO: 47 - protein, 1206 aa, Unidentified
MYYESLTKQYPVSKTIRNELIPIGKTLDNIRQNNILESDVKRKQNYEHVKGILDEYHKQLINEALDNCTLPSLKIAAEIYLKNQKEVSDREDFNKTQDLLRKEVVEKLKAHENFTKIGKKDILDLLEKLPSISEDDYNALESFRNFYTYFTSYNKVRENLYSDKEKSSTVAYRLINENFPKFLDNVKSYRFVKTAGILADGLGEEEQDSLFIVETFNKTLTQDGIDTYNSQVGKINSSINLYNQKNQKANGFRKIPKMKMLYKQILSDREESFIDEFQSDEVLIDNVESYGSVLIESLKSSKVSAFFDALRESKGKNVYVKNDLAKTAMSVIVFENWRTFDDLLNQEYDLANENKKKDDKYFEKRQKELKKNKSYSLEHLCNLSEDSCNLIENYIHQISDDIENIIINNETFLRIVINEHDRSRKLAKNRKAVKAIKDFLDSIKVLERELKLINSSGQELEKDLIVYSAHEELLVELKQVDSLYNMTRNYLTKKPFSTEKVKLNFNRSTLLNGWDRNKETDNLGVLLLKDGKYYLGIMNTSANKAFVNPPVAKTEKVFKKVDYKLLPVPNQMLPKVFFAKSNIDFYNPSSEIYSNYKKGTHKKGNMFSLEDCHNLIDFFKESISKHEDWSKFGFKFDTQASYNDISEFYREVEKQGYKLTYTDIDETYINDLIERNELYLFQIYNKDFSMYSKGKLNLHTLYFMMLFDQRNIDDVVYKLNGEAEVFYRPASISEDELIIHKAGEEIKNKNPNRARTKETSTFSYDIVKDKRYSKDKFTLHIPITMNFGVDEVKRFNDAVNSAIRIDENVNVIGIDRGERNLLYVVVIDSKGNILEQISLNSIINKEYDIETDYHALLDEREGGRDKARKDWNTVENIRDLKAGLYLQVVNVVAKLVLKYNAIICLEDLNFGFKRGRQKVEKQVYQKFEKMLIDKLNYLVIDKSREQTSPKELGGALNALQLTSKFKSFKELGKQSGVIYYVPAYLTSKIDPTTGFANLFYMKCENVEKSKRFFDGFDFIRFNALENVFEFGFDYRSFTQRACGINSKWTVCTNGERIIKYRNPDKNNMFDEKVVVVTDEMKNLFEQYKIPYEDGRNVKDMIISNEEAEFYRRLYRLLQQTLQMRNSTSDGTRDYIISPVKNKREAYFNSELSDGSVPKDADANGAYNIARKGLWVLEQIRQKSEGEKINLAMTNAEWLEYAQTHLL

SEQ ID NO: 48 - protein, 1233 aa, Unidentified
MDYGNGQFERRAPLTKTITLRLKPIGETRETIREQKLLEQDAAFRKLVETVTPIVDDCIRKIADNALCHFGTEYDFSCLGNAISKNDSKAIKKETEKVEKLLAKVLTENLPDGLRKVNDINSAAFIQDTLTSFVQDDADKRVLIQELKGKTVLMQRFLTTRITALTVWLPDRVFENFNIFIENAEKMRILLDSPLNEKIMKFDPDAEQYASLEFYGQCLSQKDIDSYNLIISGIYADDEVKNPGINEIVKEYNQQIRGDKDESPLPKLKKLHKQILMPVEKAFFVRVLSNDSDARSILEKILKDTEMLPSKIIEAMKEADAGDIAVYGSRLHELSHVIYGDHGKLSQIIYDKESKRISELMETLSPKERKESKKRLEGLEEHIRKSTYTFDELNRYAEKNVMAAYIAAVEESCAEIMRKEKDLRTLLSKEDVKIRGNRHNTLIVKNYFNAWTVFRNLIRILRRKSEAEIDSDFYDVLDDSVEVLSLTYKGENLCRSYITKKIGSDLKPEIATYGSALRPNSRWWSPGEKFNVKFHTIVRRDGRLYYFILPKGAKPVELEDMDGDIECLQMRKIPNPTIFLPKLVFKDPEAFFRDNPEADEFVFLSGMKAPVTITRETYEAYRYKLYTVGKLRDGEVSEEEYKRALLQVLTAYKEFLENRMIYADLNFGFKDLEEYKDSSEFIKQVETHNTFMCWAKVSSSQLDDLVKSGNGLLFEIWSERLESYYKYGNEKVLRGYEGVLLSILKDENLVSMRTLLNSRPMLVYRPKESSKPMVVHRDGSRVVDRFDKDGKYIPPEVHDELYRFFNNLLIKEKLGEKARKILDNKKVKVKVLESERVKWSKFYDEQFAVTFSVKKNADCLDTTKDLNAEVMEQYSESNRLILIRNTTDILYYLVLDKNGKVLKQRSLNIINDGARDVDWKERFRQVTKDRNEGYNEWDYSRTSNDLKEVYLNYALKEIAEAVIEYNAILIIEKMSNAFKDKYSFLDDVTFKGFETKKLAKLSDLHFRGIKDGEPCSFTNPLQLCQNDSNKILQDGVIFMVPNSMTRSLDPDTGFIFAINDHNIRTKKAKLNFLSKFDQLKVSSEGCLIMKYSGDSLPTHNTDNRVWNCCCNHPITNYDRETKKVEFIEEPVEELSRVLEENGIETDTELNKLNERENVPGKVVDAIYSLVLNYLRGTVSGVAGQRAVYYSPVTGKKYDISFIQAMNLNRKCDYYRIGSKERGEWTDFVAQLIN

SEQ ID NO: 49 - protein, 1227 aa, Unidentified
MSKLEKFTNCYSLSKTLRFKAIPVGKTQENIDNKRLLVEDEKRAEDYKGVKKLLDRYYLSFINDVLHSIKLKNLNNYISLFRKKTRTEKENKELENLEINLRKEIAKAFKGNEGYKSLFKKDIIETILPEFLDDKDEIALVNSFNGFTTAFTGFFDNRENMFSEEAKSTSIAFRCINENLTRYISNMDIFEKVDAIFDKHEVQEIKEKILNSDYDVEDFFEGEFFNFVLTQEGIDVYNAIIGGFVTESGEKIKGLNEYINLYNQKTKQKLPKFKPLYKQVLSDRESLSFYGEGYTSDEEVLEVFRNTLNKNSEIFSSIKKLEKLFKNFDEYSSAGIFVKNGPAISTISKDIFGEWNVIRDKWNAEYDDIHLKKKAVVTEKYEDDRRKSFKKIGSFSLEQLQEYADADLSVVEKLKEIIIQKVDEIYKVYGSSEKLFDADFVLEKSLKKNDAVVAIMKDLLDSVKSFENYIKAFFGEGKETNRDESFYGDFVLAYDILLKVDHIYDAIRNYVTQKPYSKDKFKLYFQNPQFMGGWDKDKETDYRATILRYGSKYYLAIMDKKYAKCLQKIDKDDVNGNYEKINYKLLPGPNKMLPKVFFSKKWMAYYNPSEDIQKIYKNGTFKKGDMFNLNDCHKLIDFFKDSISRYPKWSNAYDFNFSETEKYKDIAGFYREVEEQGYKVSFESASKKEVDKLVEEGKLYMFQIYNKDFSDKSHGTPNLHTMYFKLLFDENNHGQIRLSGGAELFMRRASLKKEELVVHPANSPIANKNPDNPKKTTTLSYDVYKDKRFSEDQYELHIPIANINKCPKNIFKINTEVRVLLKHDDNPYVIGIDRGERNLLYIVVVDGKGNIVEQYSLNEIINNFNGIRIKTDYHSLLDKKEKERFEARQNWTSIENIKELKAGYISQVVHKICELVEKYDAVIALEDLNSGFKNSRVKVEKQVYQKFEKMLIDKLNYMVDKKSNPCATGGALKGYQITNKFESFKSMSTQNGFIFYIPAWLTSKIDPSTGFVNLLKTKYTSIADKKFISSFDRIMYVPEEDLFEFALDYKNFSRTDADYIKKWKLYSYGNRIRIFRNPKKNNVFDWEEVCLTSAYKELFNKYGINYQQGDIRALLCEQSDKAFYSSFMALMSLMLQMRNSITGRTDVDFLISPVKNSDGIFYDSRNYEAQENAILPKNADANGAYNIARKVLWAIGQFKKAEDEKLDKVKIASNKEWLEYAQTSVKH

SEQ ID NO: 50 - protein, 1264 aa, Leptospira inadai
MEDYSGFVNIYSIQKTLRFELKPVGKTLEHIEKKGFLKKDKIRAEDYKAVKKIIDKYHRAYIEEVFDSVLHQKKKKDKTRFSTQFIKEIKEFSELYYKTEKNIPDKERLEALSEKLRKMLVGAFKGEFSEEVAEKYNKNLFSKELIRNEIEKFCETDEERKQVSNFKSFTTYFTGFHSNRQNIYSDEKKSTAIGYRIIHQNLPKFLDNLKIIESIQRRFKDFPWSDLKKNLKKIDKNIKLTEYFSIDGFVNVLNQKGIDAYNTILGGKSEESGEKIQGLNEYINLYRQKNNIDRKNPLNVKILFKQILGDRETKSFIPEAFPDDQSVLNSITEFAKYLKLDKKKKSIIAELKKFLSSFNRYELDGIYLANDNSLASISTFLFDDWSFIKKSVSFKYDESVGDPKKKIKSPLKYEKEKEKWLKQKYYTISFLNDAIESYSKSQDEKRVKIRLEAYFAEFKSKDDAKKQFDLLERIEEAYAIVEPLLGAEYPRDRNLKADKKEVGKIKDFLDSIKSLQFFLKPLLSAEIFDEKDLGFYNQLEGYYEEIDISGHLYNKVRNYLTGKIYSKEKFKLNFENSTLLKGWDENREVANLCVIFREDQKYYLGVMDKENNTILSDIPKVKPNELFYEKMVYKLIPTPHMQLPRIIFSSDNLSIYNPSKSILKIREAKSFKEGKNFKLKDCHKFIDFYKESISKNEDWSRFDFKFSKTSSYENISEFYREVERQGYNLDFKKVSKFYIDSLVEDGKLYLFQIYNKDFSIFSKGKPNLHTIYFRSLFSKENLKDVCLKLNGEAEMFFRKKSINYDEKKKREGHHPELFEKLKYPILKDKRYSEDKFQFHLPISLNFKSKERLNFNLKVNEFLKRNKDINIIGIDRGERNLLYLVMINQKGEILKQTLLDSMQSGKGRPEINYKEKLQEKEIERDKARKSWGTVENIKELKEGYLSIVIHQISKLMVENNAIVVLEDLNIGFKRGRQKVERQVYQKFEKMLIDKLNFLVFKENKPTEPGGVLKAYQLTDEFQSFEKLSKQTGFLFYVPSWNTSKIDPRTGFIDFLHPAYENIEKAKQWINKFDSIRFNSKMDWFEFTADTRKFSENLMLGKNRVWVICTTNVERYFTSKTANSSIQYNSIQITEKLKELFVDIPFSNGQDLKPEILRKNDAVFFKSLLFYIKTTLSLRQNNGKKGEEEKDFILSPVVDSKGRFFNSLEASDDEPKDADANGAYHIALKGLMNLLVLNETKEENLSRPKWKIKNKDWLEFVWERNR

SEQ ID NO: 51 - protein, 1373 aa, Moraxella bovoculi
MLFQDFTHLYPLSKTVRFELFIDRTLEHIHAKNFLSQDETMADMHQKVKVILDDYHRDFIADMMGEVKLTKLAEFYDVYLKFRKNPKDDELQKAQLKDLQAVLRKEIVKPIGNGGKYKAGYDRLFGAKLFKDGKELGDLAKFVIAQEGESSPKLAHLAHFEKFSTYFTGFHDNRKNMYSDEDKHTAIAYRLIHENLPRFIDNLQILTTIKQKHSALYDQIINELTASGLDVSLASHLDGYHKLLTQEGITAYNTLLGGISGEAGSPKIQGINELINSHHNQHCHKSERIAKLRPLHKQILSDGMSVSFLPSKFADDSEMCQAVNEFYRHYADVFAKVQSLFDGFDDHQKDGIYVEHKNLNELSKQAFGDFALLGRVLDGYYVDVVNPEFNERFAKAKTDNAKAKLTKEKDKFIKGVHSLASLEQAIEHYTARHDDESVQAGKLGQYFKHGLAGVDNPIQKIHNNHSTIKGFLERERPAGERALPKIKSGKNPEMTQLRQLKELLDNALNVAHFAKLLTTKTTLDNQDGNFYGEFGVLYDELAKIPTLYNKVRDYLSQKPFSTEKYKLNFGNPTLLNGWDLNKEKDNFGVILQKDGCYYLALLDKAHKKVFDNAPNTGKSIYQKMIYKYLEVRKQFPKVFFSKEAIAINYHPSKELVEIKDKGRQRSDDERLKLYRFILECLKIHPKYDKKFEGAIGDIQLFKKDKKGREVPISEKDLFKDINGIFSSKPKLEMEDFFIGEFKRYNPSQDLVDQYNIYKKIDSNDNRKKENFYNNHPKFKKDLVRYYYESMCKHEEWEESFEFSKKLQDIGCYVDVNELFTEIETRRLNYKISFCNINADYIDELVEQGQLYLFQIYNKDFSPKAHGKPNLHTLYFKALFSEDNLADPIYKLNGEAQIFYRKASLDMNETTIHRAGEVLENKNPDNPKKRQFVYDIIKDKRYTQKDFMLHVPITMNFGVQGMTIKEFNKKVNQSIQQYDEVNVIGIDRGERHLLYLTVINSKGEILEQCSLNDITTASANGTQMTTPYHKILDKREIERLNARVGWGEIETIKELKSGYLSHVVHQISQLMLKYNAIVVLEDLNFGFKRGRFKVEKQIYQNFENALIKKLNHLVLKDKADDEIGSYKNALQLTNNFTDLKSIGKQTGFLFYVPAWNTSKIDPETGFVDLLKPRYENIQASQAFFGKFDKICYNADKDYFEFHIDYAKFTDKAKNSRQIWTICSHGDKRYVYDKTANQNKGAAKGINVNDILKSLFARHHINEKQPNLVMDICQNNDKEFHKSLMYLLKTLLALRYSNASSDEDFILSPVANDEGVFFNSALADDTQPQNADANGAYHIALKGLWLLNELKNSDDLNKVKLAIDNQTWLNFAQNR

SEQ ID NO: 52 - protein, 1352 aa, Unidentified
MENIFDQFIGKYSLSKTLRFELKPVGKTEDFLKINKVFEKDQTIDDSYNQAKFYFDSLHQKFIDAALASDKTSELSFQNFADVLEKQNKIILDKKREMGALRKRDKNAVGIDRLQKEINDAEDIIQKEKEKIYKDVRTLFDNEAESWKTYYQEREVDGKKITESKADLKQKGADFLTAAGILKVLKYEFPEEKEKEFQAKNQPSLFVEEKENPGQKRYIFDSFDKFAGYLTKFQQTKKNLYAADGTSTAVATRIADNFIIFHQNTKVFRDKYKNNHTDLGFDEENIFEIERYKNCLLQREIEHIKNENSYNKIIGRINKKIKEYRDQKAKDTKLTKSDFPFFKNLDKQILGEVEKEKQLIEKTREKTEEDVLIERFKEFIENNEERFTAAKKLMNAFCNGEFESEYEGIYLKNKAINTISRRWFVSDRDFELKLPQQKSKNKSEKNEPKVKKFISIAEIKNAVEELDGDIFKAVFYDKKIIAQGGSKLEQFLVIWKYEFEYLFRDIERENGEKLLGYDSCLKIAKQLGIFPQEKEAREKATAVIKNYADAGLGIFQMMKYFSLDDKDRKNTPGQLSTNFYAEYDGYYKDFEFIKYYNEFRNFITKKPFDEDKIKLNFENGALLKGWDENKEYDFMGVILKKEGRLYLGIMHKNHRKLFQSMGNAKGDNANRYQKMIYKQIADASKDVPRLLLTSKKAMEKFKPSQEILRIKKEKTFKRESKNFSLRDLHALIEYYRNCIPQYSNWSFYDFQFQDTGKYQNIKEFTDDVQKYGYKISFRDIDDEYINQALNEGKMYLFEVVNKDIYNTKNGSKNLHTLYFEHILSAENLNDPVFKLSGMAEIFQRQPSVNEREKITTQKNQCILDKGDRAYKYRRYTEKKIMFHMSLVLNTGKGEIKQVQFNKIINQRISSSDNEMRVNVIGIDRGEKNLLYYSVVKQNGEIIEQASLNEINGVNYRDKLIEREKERLKNRQSWKPVVKIKDLKKGYISHVIHKICQLIEKYSAIVVLEDLNMRFKQIRGGIERSVYQQFEKALIDKLGYLVFKDNRDLRAPGGVLNGYQLSAPFVSFEKMRKQTGILFYTQAEYTSKTDPITGFRKNVYISNSASLDKIKEAVKKFDAIGWDGKEQSYFFKYNPYNLADEKYKNSTVSKEWAIFASAPRIRRQKGEDGYWKYDRVKVNEEFEKLLKVWNFVNPKATDIKQEIIKKIKAGDLQGEKELDGRLRNFWHSFIYLFNLVLELRNSFSLQIKIKAGEVIAVDEGVDFIASPVKPFFTTPNPYIPSNLCWLAVENADANGAYNIARKGVMILKKIREHAKKDPEFKKLPNLFISNAEWDEAARDWGKYAGTTALNLDH

SEQ ID NO: 53 - protein, 1260 aa, Porphyromonas crevioricanis
MDSLKDFTNLYPVSKTLRFELKPVGKTLENIEKAGILKEDEHRAESYRRVKKIIDTYHKVFIDSSLENMAKMGIENEIKAMLQSFCELYKKDHRTEGEDKALDKIRAVLRGLIVGAFTGVCGRRENTVQNEKYESLFKEKLIKEILPDFVLSTEAESLPFSVEEATRSLKEFDSFTSYFAGFYENRKNIYSTKPQSTAIAYRLIHENLPKFIDNILVFQKIKEPIAKELEHIRADFSAGGYIKKDERLEDIFSLNYYIHVLSQAGIEKYNALIGKIVTEGDGEMKGLNEHINLYNQQRGREDRLPLFRPLYKQILSDREQLSYLPESFEKDEELLRALKEFYDHIAEDILGRTQQLMTSISEYDLSRIYVRNDSQLTDISKKMLGDWNAIYMARERAYDHEQAPKRITAKYERDRIKALKGEESISLANLNSCIAFLDNVRDCRVDTYLSTLGQKEGPHGLSNLVENVFASYHEAEQLLSFPYPEENNLIQDKDNVVLIKNLLDNISDLQRFLKPLWGMGDEPDKDERFYGEYNYIRGALDQVIPLYNKVRNYLTRKPYSTRKVKLNFGNSQLLSGWDRNKEKDNSCVILRKGQNFYLAIMNNRHKRSFENKMLPEYKEGEPYFEKMDYKFLPDPNKMLPKVFLSKKGIEIYKPSPKLLEQYGHGTHKKGDTFSMDDLHELIDFFKHSIEAHEDWKQFGFKFSDTATYENVSSFYREVEDQGYKLSFRKVSESYVYSLIDQGKLYLFQIYNKDFSPCSKGTPNLHTLYWRMLFDERNLADVIYKLDGKAEIFFREKSLKNDHPTHPAGKPIKKKSRQKKGEESLFEYDLVKDRRYTMDKFQFHVPITMNFKCSAGSKVNDMVNAHIREAKDMHVIGIDRGERNLLYICVIDSRGTILDQISLNTINDIDYHDLLESRDKDRQQEHRNWQTIEGIKELKQGYLSQAVHRIAELMVAYKAVVALEDLNMGFKRGRQKVESSVYQQFEKQLIDKLNYLVDKKKRPEDIGGLLRAYQFTAPFKSFKEMGKQNGFLFYIPAWNTSNIDPTTGFVNLFHVQYENVDKAKSFFQKFDSISYNPKKDWFEFAFDYKNFTKKAEGSRSMWILCTHGSRIKNFRNSQKNGQWDSEEFALTEAFKSLFVRYEIDYTADLKTAIVDEKQKDFFVDLLKLFKLTVQMRNSWKEKDLDYLISPVAGADGRFFDTREGNKSLPKDADANGAYNIALKGLWALRQIRQTSEGGKLKLAISNKEWLQFVQERSYEKD

SEQ ID NO: 54 - protein, 1324 aa, Prevotella disiens
MENYQEFTNLFQLNKTLRFELKPIGKTCELLEEGKIFASGSFLEKDKVRADNVSYVKKEIDKKHKIFIEETLSSFSISNDLLKQYFDCYNELKAFKKDCKSDEEEVKKTALRNKCTSIQRAMREAISQAFLKSPQKKLLAIKNLIENVFKADENVQHFSEFTSYFSGFETNRENFYSDEEKSTSIAYRLVHDNLPIFIKNIYIFEKLKEQFDAKTLSEIFENYKLYVAGSSLDEVFSLEYFNNTLTQKGIDNYNAVIGKIVKEDKQEIQGLNEHINLYNQKHKDRRLPFFISLKKQILSDREALSWLPDMFKNDSEVIDALKGFYIEDGFENNVLTPLATLLSSLDKYNLNGIFIRNNEALSSLSQNVYRNFSIDEAIDAQNAELQTFNNYELIANALRAKIKKETKQGRKSFEKYEEYIDKKVKAIDSLSIQEINELVENYVSEFNSNSGNMPRKVEDYFSLMRKGDFGSNDLIENIKTKLSAAEKLLGTKYQETAKDIFKKDENSKLIKELLDATKQFQHFIKPLLGTGEEADRDLVFYGDFLPLYEKFEELTLLYNKVRNRLTQKPYSKDKIRLCFNKPKLMTGWVDSKTEKSDNGTQYGGYLFRKKNEIGEYDYFLGISSKAQLFRKNEAVIGDYERLDYYQPKANTIYGSAYEGENSYKEDKKRLNKVIIAYIEQIKQTNIKKSIIESISKYPNISDDDKVTPSSLLEKIKKVSIDSYNGILSFKSFQSVNKEVIDNLLKTISPLKNKAEFLDLINKDYQIFTEVQAVIDEICKQKTFIYFPISNVELEKEMGDKDKPLCLFQISNKDLSFAKTFSANLRKKRGAENLHTMLFKALMEGNQDNLDLGSGAIFYRAKSLDGNKPTHPANEAIKCRNVANKDKVSLFTYDIYKNRRYMENKFLFHLSIVQNYKAANDSAQLNSSATEYIRKADDLHIIGIDRGERNLLYYSVIDMKGNIVEQDSLNIIRNNDLETDYHDLLDKREKERKANRQNWEAVEGIKDLKKGYLSQAVHQIAQLMLKYNAIIALEDLGQMFVTRGQKIEKAVYQQFEKSLVDKLSYLVDKKRPYNELGGILKAYQLASSITKNNSDKQNGFLFYVPAWNTSKIDPVTGFTDLLRPKAMTIKEAQDFFGAFDNISYNDKGYFEFETNYDKFKIRMKSAQTRWTICTFGNRIKRKKDKNYWNYEEVELTEEFKKLFKDSNIDYENCNLKEEIQNKDNRKFFDDLIKLLQLTLQMRNSDDKGNDYIISPVANAEGQFFDSRNGDKKLPLDADANGAYNIARKGLWNIRQIKQTKNKDDLNLSISSTEWLDFVREKPYLK

SEQ ID NO: 55 - protein, 1484 aa, Unidentified
MSNFFKNFTNLYELSKTLRFELKPVGDTLTNMKDHLEYDEKLQTFLKDQNIDDAYQALKPQFDEIHEEFITDSLESKKAKEIDFSEYLDLFQEKKELNDSEKKLRNKIGETFNKAGEKWKKEKYPQYEWKKGSKIANGADILSCQDMLQFIKYKNPEDEKIKNYIDDTLKGFFTYFGGFNQNRANYYETKKEASTAVATRIVHENLPKFCDNVIQFKHIIKRKKDGTVEKTERKTEYLNAYQYLKNNNKITQIKDAETEKMIESTPIAEKIFDVYYFSSCLSQKQIEEYNRIIGHYNLLINLYNQAKRSEGKHLSANEKKYKDLPKFKTLYKQIGCGKKKDLFYTIKCDTEEEANKSRNEGKESHSVEEIINKAQEAINKYFKSNNDCENINTVPDFINYILTKENYEGVYWSKAAMNTISDKYFANYHDLQDRLKEAKVFQKADKKSEDDIKIPEAIELSGLFGVLDSLADWQTTLFKSSILSNEKLKIITDSQTPSEALLKMIFNDIEKNMESFLKETNDIITLKKYKGNKEGTEKIKQWFDYTLAINRMLKYFLVKENKIKGNSLDTNISEALKTLIYSDDAEWFKWYDALRNYLTQKPQDEAKENKLKLNFDNPSLAGGWDVNKECSNFCVILKDKNEKKYLAMIKKGENTLFQKEWTEGRGKNLTKKSNPLFEINNCEILSKMEYDFWADVSKMIPKCSTQLKAVVNHFKQSDNEFIFPIGYKVTSGEKFREECKISKQDFELNNKVFNKNELSVTAMRYDLSSTQEKQYIKAFQKEYWELLFKQEKRDTKLTNNEIFNEWINFCNKKYSELLSWERKYKDALTNWINFCKYFLSKYPKTTLFNYSFKESENYNSLDEFYRDVDICSYKLNINTTINKSILDRLVEEGKLYLFEIKNQDSNDGKSIGHKNNLHTIYWNAIFENFDNRPKLNGEAEIFYRKAISKDKLGIVKGKKTKNGTWIIKNYRFSKEKFILHVPITLNFCSNNEYVNDIVNTKFYNFSNLHFLGIDRGEKHLAYYSLVNKNGEIVDQGTLNLPFTDKDGNQRSIKKEKYFYNKQEDKWEAKEVDXWNYNDLLDAMASNRDMARKNWQRIGTIKEAKNGYVSLVIRKIADLAVNNERPAFIVLEDLNTGFKRSRQKIDKSVYQKFELALAKKLNFLVDKNAKRDEIGSPTKALQLTPPVNNYGDIENKKQAGIMLYTRANYTSQTDPATGWRKTIYLKAGPEETTYKKDGKIKNKSVKDQIIETFTDIGFDGKDYYFEYDKGEFVDEKTGEIKPKKWRLYSGENGKSLDRFRGEREKDKYEWKIDKIDIVKILDDLFVNFDKNISLLKQLKEGVELTRNNEHGTGESLRFAINLIQQIRNTGNNERDNDFILSPVRDENGKHFDSREYWDKETKGEKISMPSSGDANGAFNIARKGIIMNAHILANSDSKDLSLFVSDEEWDLHLNNKTEWKKQLNIFSSRKAMAKRKKKRPAATKK

SEQ ID NO: 56 - protein, 1245 aa, Porphyromonas macacae
MKTQHFFEDFTSLYSLSKTIRFELKPIGKTLENIKKNGLIRRDEQRLDDYEKLKKVIDEYHEDFIANILSSFSFSEEILQSYIQNLSISEARAKIEKTMRDTLAKAFSEDERYKSIFKKELVKKDIPVWCPAYKSLCKKFDNFTTSLVPFHENRKNLYTSNEITASIPYRIVHVNLPKFIQNIEALCELQKKMGADLYLEMMENLRNVWPSFVKTPDDLCNLKTYNHLMVQSSISEYNRFVGGYSTEDGTKHQGINEWINIYRQRNKEMRLPGLVFLHKQILAKVDSSSFISDTLENDDQVFCVLRQFRKLFWNTVSSKEDDAASLKDLFCGLSGYDPEAIYVSDAHLATISKNIFDRWNYISDAIRRKTEVLMPRKKESVERYAEKISKQIKKRQSYSLAELDDLLAHYSEESLPAGFSLLSYFTSLGGQKYLVSDGEVILYEEGSNIWDEVLIAFRDLQVILDKDFTEKKLGKDEEAVSVIKKALDSALRLRKFFDLLSGTGAEIRRDSSFYALYTDRMDKLKGLLKMYDKVRNYLTKKPYSIEKFKLHFDNPSLLSGWDKNKELNNLSVIFRQNGYYYLGIMTPKGKNLFKTLPKLGAEEMFYEKMEYKQIAEPMLMLPKVFFPKKTKPAFAPDQSVVDIYNKKTFKTGQKGFNKKDLYRLIDFYKEALTVHEWKLFNFSFSPTEQYRNIGEFFDEVREQAYKVSMVNVPASYIDEAVENGKLYLFQIYNKDFSPYSKGIPNLHTLYWKALFSEQNQSRVYKLCGGGELFYRKASLHMQDTTVHPKGISIHKKNLNKKGETSLFNYDLVKDKRFTEDKFFFHVPISINYKNKKITNVNQMVRDYIAQNDDLQHGIDRGERNLLYISRIDTRGNLLEQFSLNVIESDKGDLRTDYQKILGDREQERLRRRQEWKSIESIKDLKDGYMSQVVHKICNMVVEHKAIVVLENLNLSFMKGRKKVEKSVYEKFERMLVDKLNYLVVDKKNLSNEPGGLYAAYQLTNPLFSFEELHRYPQSGILFFVDPWNTSLTDPSTGFVNLLGRINYTNVGDARKFFDRFNAIRYDGKGNILFDLDLSRFDVRVETQRKLWTLTTFGSRIAKSKKSGKWMVERIENLSLCFLELFEQFNIGYRVEKDLKKAILSQDRKEFYVRLIYLFNLMMQIRNSDGEEDYILSPALNEKNLQFDSRLIEAKDLPVDADANGAYNVARKGLMVVQRIKRGDHESIHRIGRAQWLRYVQEGIVE

SEQ ID NO: 57 - protein, 1250 aa, Smithella sp.
MQTLFENFTNQYPVSKTLRFELIPQGKTKDFIEQKGLLKKDEDRAEKYKKVKNIIDEYHKDFIEKSLNGLKLDGLEKYKTLYLKQEKDDKDKKAFDKEKENLRKQIANAFRNNEKFKTLFAKELIKNDLMSFACEEDKKNVKEFEAFTTYFTGFHQNRANMYVADEKRTAIASRLIHENLPKFIDNIKIFEKMKKEAPELLSPFNQTLKDMKDVIKGTTLEEIFSLDYFNKTLTQSGIDIYNSVIGGRTPEEGKTKIKGLNEYINTDFNQKQTDKKKRQPKFKQLYKQILSDRQSLSFIAEAFKNDTEILEAIEKFYVNELLHFSNEGKSTNVLDAIKNAVSNLESFNLTKMYFRSGASLTDVSRKVFGEWSIINRALDNYYATTYPIKPREKSEKYEERKEKWLKQDFNVSLIQTAIDEYDNETVKGKNSGKVIADYFAKFCDDKETDLIQKVNEGYIAVKDLLNTPCPENEKLGSNKDQVKQIKAFMDSIMDIMHFVRPLSLKDTDKEKDETFYSLFTPLYDHLTQTIALYNKVRNYLTQKPYSTEKIKLNFENSTLLGGWDLNKETDNTAIILRKDNLYYLGIMDKRHNRIFRNVPKADKKDFCYEKMVYKLLPGANKMLPKVFFSQSRIQEFTPSAKLLENYANETHKKGDNFNLNHCHKLIDFFKDSINKHEDWKNFDFRFSATSTYADLSGFYHEVEHQGYKISFQSVADSFIDDLVNEGKLYLFQIYNKDFSPFSKGKPNLHTLYWKMLFDENNLKDVVYKLNGEAEVFYRKKSIAEKNTTIHKANESIINKNPDNPKATSTFNYDIVKDKRYTIDKFQFHIPITMNFKAEGIFNMNQRVNQFLKANPDINIIGIDRGERHLLYYALINQKGKILKQDTLNVIANEKQKVDYHNLLDKKEGDRATARQEWGVIETIKELKEGYLSQVIHKLTDLMIENNAIIVMEDLNFGFKRGRQKVEKQVYQKFEKMLIDKLNYLVDKNKKANELGGLLNAFQLANKFESFQKMGKQNGFIFYVPAWNTSKTDPATGFIDFLKPRYENLNQAKDFFEKFDSIRLNSKADYFEFAFDFKNFTEKADGGRTKWTVCTTNEDRYQWNRALNNNRGSQEKYDITAELKSLFDGKVDYKSGKDLKQQIASQESADFFKALMKNLSITLSLRHNNGEKGDNEQDYILSPVADSKGRFFDSRKADDDMPKNADANGAYHIALKGLWCLEQISKTDDLKKVKLAISNKEWLEFVQTLKG

SEQ ID NO: 58 - protein, 1228 aa, Unidentified
MSKLEKFTNCYSLSKTLRFKAIPVGKTQENIDNKRLLVEDEKRAEDYKGVKKLLDRYYLSFINDVLHSIKLKNLNNYISLFRKKTRTEKENKELENLEINLRKEIAKAFKGNEGYKSLFKKDIIETILPEFLDDKDEIALVNSFNGFTTAFTGFFDNRENMFSEEAKSTSIAFRCINENLTRYISNMDIFEKVDAIFDKHEVQEIKEKILNSDYDVEDFFEGEFFNFVLTQEGIDVYNAIIGGFVTESGEKIKGLNEYINLYNQKTKQKLPKFKPLYKQVLSDRESLSFYGEGYTSDEEVLEVFRNTLNKNSEIFSSIKKLEKLFKNFDEYSSAGIFVKNGPAISTISKDIFGEWNVIRDKWNAEYDDIHLKKKAVVTEKYEDDRRKSFKKIGSFSLEQLQEYADADLSVVEKLKEIIIQKVDEIYKVYGSSEKLFDADFVLEKSLKKNDAVVAIMKDLLDSVKSFENYIKAFFGEGKETNRDESFYGDFVLAYDILLKVDHIYDAIRNYVTQKPYSKDKFKLYFQNPQFMGGWDKDKETDYRATILRYGSKYYLAIMDKKYAKCLQKIDKDDVNGNYEKINYKLLPGPNKMLPKVFFSKKWMAYYNPSEDIQKIYKNGTFKKGDMFNLNDCHKLIDFFKDSISRYPKWSNAYDFNFSETEKYKDIAGFYREVEEQGYKVSFESASKKEVDKLVEEGKLYMFQIYNKDFSDKSHGTPNLHTMYFKLLFDENNHGQIRLSGGAELFMRRASLKKEELVVHPANSPIANKNPDNPKKTTTLSYDVYKDKRFSEDQYELHIPIAINKCPKNIFKINTEVRVLLKHDDNPYVIGIDRGERNLLYIVVVDGKGNIVEQYSLNEIINNFNGIRIKTDYHSLLDKKEKERFEARQNWTSIENIKELKAGYISQVVHKICELVEKYDAVIALEDLNSGFKNSRVKVEKQVYQKFEKMLIDKLNYMVDKKSNPCATGGALKGYQITNKFESFKSMSTQNGFIFYIPAWLTSKIDPSTGFVNLLKTKYTSIADSKKFISSFDRIMYVPEEDLFEFALDYKNFSRTDADYIKKWKLYSYGNRIRIFRNPKKNNVFDWEEVCLTSAYKELFNKYGINYQQGDIRALLCEQSDKAFYSSFMALMSLMLQMRNSITGRTDVDFLISPVKNSDGIFYDSRNYEAQENAILPKNADANGAYNIARKVLWAIGQFKKAEDEKLDKVKIAISNKEWLEYAQTSVKH

SEQ ID NO: 59 - protein, 1227 aa, Unidentified
SKLEKFTNCYSLSKTLRFKAIPVGKTQENIDNKRLLVEDEKRAEDYKGVKKLLDRYYLSFINDVLHSIKLKNLNNYISLFRKKTRTEKENKELENLEINLRKEIAKAFKGNEGYKSLFKKDIIETILPEFLDDKDEIALVNSFNGFTTAFTGFFDNRENMFSEEAKSTSIAFRCINENLTRYISNMDIFEKVDAIFDKHEVQEIKEKILNSDYDVEDFFEGEFFNFVLTQEGIDVYNAIIGGFVTESGEKIKGLNEYINLYNQKTKQKLPKFKPLYKQVLSDRESLSFYGEGYTSDEEVLEVFRNTLNKNSEIFSSIKKLEKLFKNFDEYSSAGIFVKNGPAISTISKDIFGEWNVIRDKWNAEYDDIHLKKKAVVTEKYEDDRRKSFKKIGSFSLEQLQEYADADLSVVEKLKEIIIQKVDEIYKVYGSSEKLFDADFVLEKSLKKNDAVVAIMKDLLDSVKSFENYIKAFFGEGKETNRDESFYGDFVLAYDILLKVDHIYDAIRNYVTQKPYSKDKFKLYFQNPQFMGGWDKDKETDYRATILRYGSKYYLAIMDKKYAKCLQKIDKDDVNGNYEKINYKLLPGPNKMLPKVFFSKKWMAYYNPSEDIQKIYKNGTFKKGDMFNLNDCHKLIDFFKDSISRYPKWSNAYDFNFSETEKYKDIAGFYREVEEQGYKVSFESASKKEVDKLVEEGKLYMFQIYNKDFSDKSHGTPNLHTMYFKLLFDENNHGQIRLSGGAELFMRRASLKKEELVVHPANSPIANKNPDNPKKTTTLSYDVYKDKRFSEDQYELHIPIAINKCPKNIFKINTEVRVLLKHDDNPYVIGIDRGERNLLYIVVVDGKGNIVEQYSLNEIINNFNGIRIKTDYHSLLDKKEKERFEARQNWTSIENIKELKAGYISQVVHKICELVEKYDAVIALEDLNSGFKNSRVKVEKQVYQKFEKMLIDKLNYMVDKKSNPCATGGALKGYQITNKFESFKSMSTQNGFIFYIPAWLTSKIDPSTGFVNLLKTKYTSIADSKKFISSFDRIMYVPEEDLFEFALDYKNFSRTDADYIKKWKLYSYGNRIRIFRNPKKNNVFDWEEVCLTSAYKELFNKYGINYQQGDIRALLCEQSDKAFYSSFMALMSLMLQMRNSITGRTDVDFLISPVKNSDGIFYDSRNYEAQENAILPKNADANGAYNIARKVLWAIGQFKKAEDEKLDKVKIAISNKEWLEYAQTSVKH

SEQ ID NO: 60 - protein, 1228 aa, Synthetic construct
MSKLEKFTNCYSLSKTLRFKAIPVGKTQENIDNKRLLVEDEKRAEDYKGVKKLLDRYYLSFINDVLHSIKLKNLNNYISLFRKKTRTEKENKELENLEINLRKEIAKAFKGNEGYKSLFKKDIIETILPEFLDDKDEIALVNSFNGFTTAFTGFFDNRENMFSEEAKSTSIAFRCINENLTRYISNMDIFEKVDAIFDKHEVQEIKEKILNSDYDVEDFFEGEFFNFVLTQEGIDVYNAIIGGFVTESGEKIKGLNEYINLYNQKTKQKLPKFKPLYKQVLSDRESLSFYGEGYTSDEEVLEVFRNTLNKNSEIFSSIKKLEKLFKNFDEYSSAGIFVKNGPAISTISKDIFGEWNVIRDKWNAEYDDIHLKKKAVVTEKYEDDRRKSFKKIGSFSLEQLQEYADADLSVVEKLKEIIIQKVDEIYKVYGSSEKLFDADFVLEKSLKKNDAVVAIMKDLLDSVKSFENYIKAFFGEGKETNRDESFYGDFVLAYDILLKVDHIYDAIRNYVTQKPYSKDKFKLYFQNPQFMGGWDKDKETDYRATILRYGSKYYLAIMDKKYAKCLQKIDKDDVNGNYEKINYKLLPGPNKMLPKVFFSKKWMAYYNPSEDIQKIYKNGTFKKGDMFNLNDCHKLIDFFKDSISRYPKWSNAYDFNFSETEKYKDIAGFYREVEEQGYKVSFESASKKEVDKLVEEGKLYMFQIYNKDFSDKSHGTPNLHTMYFKLLFDENNHGQIRLSGGAELFMRRASLKKEELVVAPANSPIANKNPDNPKKTTTLSYDVYKDKRFSEDQYELHIPIAINKCPKNIFKINTEVRVLLKHDDNPYVIGIDRGERNLLYIVVVDGKGNIVEQYSLNEIINNFNGIRIKTDYHSLLDKKEKERFEARQNWTSIENIKELKAGYISQVVHKICELVEKYDAVIALEDLNSGFKNSRVKVEKQVYQKFEKMLIDKLNYMVDKKSNPCATGGALKGYQITNKFESFKSMSTQNGFIFYIPAWLTSKIDPSTGFVNLLKTKYTSIADSKKFISSFDRIMYVPEEDLFEFALDYKNFSRTDADYIKKWKLYSYGNRIRIFRNPKKNNVFDWEEVCLTSAYKELFNKYGINYQQGDIRALLCEQSDKAFYSSFMALMSLMLQMRNSITGRTDVDFLISPVKNSDGIFYDSRNYEAQENAILPKNADANGAYNIARKVLWAIGQFKKAEDEKLDKVKIAISNKEWLEYAQTSVKH

SEQ ID NO: 61 - protein, 1307 aa, Synthetic construct
MTQFEGFTNLYQVSKTLRFELIPQGKTLKHIQEQGFIEEDKARNDHYKELKPIIDRIYKTYADQCLQLVQLDWENLSAAIDSYRKEKTEETRNALIEEQATYRNAIHDYFIGRTDNLTDAINKRHAEIYKGLFKAELFNGKVLKQLGTVTTTEHENALLRSFDKFTTYFSGFYRNRKNVFSAEDISTAIPHRIVQDNFPKFKENCHIFTRLITAVPSLREHFENVKKAIGIFVSTSIEEVFSFPFYNQLLTQTQIDLYNQLLGGISREAGTEKIKGLNEVLNLAIQKNDETAHIIASLPHRFIPLFKQILSDRNTLSFILEEFKSDEEVIQSFCKYKTLLRNENVLETAEALFNELNSIDLTHIFISHKKLETISSALCDHWDTLRNALYERRISELTGKITKSAKEKVQRSLKHEDINLQEIISAAGKELSEAFKQKTSEILSHAHAALDQPLPTTLKKQEEKEILKSQLDSLLGLYHLLDWFAVDESNEVDPEFSARLTGIKLEMEPSLSFYNKARNYATKKPYSVEKFKLNFQMPTLARGWDVNREKNNGAILFVKNGLYYLGIMPKQKGRYKALSFEPTEKTSEGFDKMYYDYFPDAAKMIPKCSTQLKAVTAHFQTHTTPILLSNNFIEPLEITKEIYDLNNPEKEPKKFQTAYAKKTGDQKGYREALCKWIDFTRDFLSKYTKTTSIDLSSLRPSSQYKDLGEYYAELNPLLYHISFQRIAEKEIMDAVETGKLYLFQIYNKDFAKGHHGKPNLHTLYWTGLFSPENLAKTSIKLNGQAELFYRPKSRMKRMAARLGEKMLNKKLKDQKTPIPDTLYQELYDYVNHRLSHDLSDEARALLPNVITKEVSHEIIKDRRFTSDKFFFHVPITLNYQAANSPSKFNQRVNAYLKEHPETPIIGIDRGERNLIYITVIDSTGKILEQRSLNTIQQFDYQKKLDNREKERVAARQAWSVVGTIKDLKQGYLSQVIHEIVDLMIHYQAVVVLENLNFGFKSKRTGIAEKAVYQQFEKMLIDKLNCLVLKDYPAEKVGGVLNPYQLTDQFTSFAKMGTQSGFLFYVPAPYTSKIDPLTGFVDPFVWKTIKNHESRKHFLEGFDFLHYDVKTGDFILHFKMNRNLSFQRGLPGFMPAWDIVFEKNETQFDAKGTPFIAGKRIVPVIENHRFTGRYRDLYPANELIALLEEKGIVFRDGSNILPKLLENDDSHAIDTMVALIRSVLQMRNSNAATGEDYINSPVRDLNGVCFDSRFQNPEWPMDADANGAYHIALKGQLLLNHLKESKDLKLQNGISNQDWLAYIQELRN

SEQ ID NO: 62 - protein, 1307 aa, Synthetic construct
MTQFEGFTNLYQVSKTLRFELIPQGKTLKHIQEQGFIEEDKARNDHYKELKPIIDRIYKTYADQCLQLVQLDWENLSAAIDSYRKEKTEETRNALIEEQATYRNAIHDYFIGRTDNLTDAINKRHAEIYKGLFKAELFNGKVLKQLGTVTTTEHENALLRSFDKFTTYFSGFYRNRKNVFSAEDISTAIPHRIVQDNFPKFKENCHIFTRLITAVPSLREHFENVKKAIGIFVSTSIEEVFSFPFYNQLLTQTQIDLYNQLLGGISREAGTEKIKGLNEVLNLAIQKNDETAHIIASLPHRFIPLFKQILSDRNTLSFILEEFKSDEEVIQSFCKYKTLLRNENVLETAEALFNELNSIDLTHIFISHKKLETISSALCDHWDTLRNALYERRISELTGKITKSAKEKVQRSLKHEDINLQEIISAAGKELSEAFKQKTSEILSHAHAALDQPLPTTLKKQEEKEILKSQLDSLLGLYHLLDWFAVDESNEVDPEFSARLTGIKLEMEPSLSFYNKARNYATKKPYSVEKFKLNFQMPTLARGWDVNREKNNGAILFVKNGLYYLGIMPKQKGRYKALSFEPTEKTSEGFDKMYYDYFPDAAKMIPKCSTQLKAVTAHFQTHTTPILLSNNFIEPLEITKEIYDLNNPEKEPKKFQTAYAKKTGDQKGYREALCKWIDFTRDFLSKYTKTTSIDLSSLRPSSQYKDLGEYYAELNPLLYHISFQRIAEKEIMDAVETGKLYLFQIYNKDFAKGHHGKPNLHTLYWTGLFSPENLAKTSIKLNGQAELFYRPKSRMKRMAHRLGEKMLNKKLKDQKTPIPDTLYQELYDYVNHRLSHDLSDEARALLPNVITKEVSHEIIKDRRFTSDKFFFHVPITLNYQAANSPSKFNQRVNAYLKEHPETPIIGIDRGERNLIYITVIDSTGKILEQRSLNTIQQFDYQKKLDNREKERVAARQAWSVVGTIKDLKQGYLSQVIHEIVDLMIHYQAVVVLENLNFGFKSKRTGIAEKAVYQQFEKMLIDKLNCLVLKDYPAEKVGGVLNPYQLTDQFTSFAKMGTQSGFLFYVPAPYTSKIDPLTGFVDPFVWKTIKNHESRKHFLEGFDFLHYDVKTGDFILHFKMNRNLSFQRGLPGFMPAWDIVFEKNETQFDAKGTPFIAGKRIVPVIENHRFTGRYRDLYPANELIALLEEKGIVFRDGSNILPKLLENDDSHAIDTMVALIRSVLQMRNSNAATGEDYINSPVRDLNGVCFDSRFQNPEWPMDADANGAYHIALKGQLLLNHLKESKDLKLQNGISNQDWLAYIQELRN

SEQ ID NO: 63 - protein, 1107 aa, Bacillus hisashii
ATRSFILKIEPNEEVKKGLWKTHEVLNHGIAYYMNILKLIRQEAIYEHHEQDPKNPKKVSKAEIQAELWDFVLKMQKCNSFTHEVDKDEVFNILRELYEELVPSSVEKKGEANQLSNKFLYPLVDPNSQSGKGTASSGRKPRWYNLKIAGDPSWEEEKKKWEEDKKKDPLAKILGKLAEYGLIPLFIPYTDSNEPIVKEIKWMEKSRNQSVRRLDKDMFIQALERFLSWESWNLKVKEEYEKVEKEYKTLEERIKEDIQALKALEQYEKERQEQLLRDTLNTNEYRLSKRGLRGWREIIQKWLKMDENEPSEKYLEVFKDYQRKHPREAGDYSVYEFLSKKENHFIWRNHPEYPYLYATFCEIDKKKKDAKQQATFTLADPINHPLWVRFEERSGSNLNKYRILTEQLHTEKLKKKLTVQLDRLIYPTESGGWEEKGKVDIVLLPSRQFYNQIFLDIEEKGKHAFTYKDESIKFPLKGTLGGARVQFDRDHLRRYPHKVESGNVGRIYFNMTVNIEPTESPVSKSLKIHRDDFPKVVNFKPKELTEWIKDSKGKKLKSGIESLEIGLRVMSIDLGQRQAAAASIFEVVDQKPDIEGKLFFPIKGTELYAVHRASFNIKLPGETLVKSREVLRKAREDNLKLMNQKLNFLRNVLHFQQFEDITEREKRVTKWISRQENSDVPLVYQDELIQIRELMYKPYKDWVAFLKQLHKRLEVEIGKEVKHWRKSLSDGRKGLYGISLKNIDEIDRTRKFLLRWSLRPTEPGEVRRLEPGQRFAIDQLNHLNALKEDRLKKMANTIIMHALGYCYDVRKKKWQAKNPACQIILFEDLSNYNPYGERSRFENSRLMKWSRREIPRQVALQGEIYGLQVGEVGAQFSSRFHAKTGSPGIRCRVVTKEKLQDNRFFKNLQREGRLTLDKIAVLKEGDLYPDKGGEKFISLSKDRKCVTTHADINAAQNLQKRFWTRTHGFYKVYCKAYQVDGQTVYIPESKDQKQKIIEEFGEGYFILKDGVYEWVNAGKLKIKKGSSKQSSSELVDSDILKDSFDLASELKGEKLMLYRDPSGNVFPSDKWMAAGVFFGKLERILISKLTNQYSISTIEDDSSKQSM

SEQ ID NO: 64 - protein, 1228 aa, Synthetic construct
MSKLEKFTNCYSLSKTLRFKAIPVGKTQENIDNKRLLVEDEKRAEDYKGVKKLLDRYYLSFINDVLHSIKLKNLNNYISLFRKKTRTEKENKELENLEINLRKEIAKAFKGNEGYKSLFKKDIIETILPEFLDDKDEIALVNSFNGFTTAFTGFFDNRENMFSEEAKSTSIAFRCINENLTRYISNMDIFEKVDAIFDKHEVQEIKEKILNSDYDVEDFFEGEFFNFVLTQEGIDVYNAIIGGFVTESGEKIKGLNEYINLYNQKTKQKLPKFKPLYKQVLSDRESLSFYGEGYTSDEEVLEVFRNTLNKNSEIFSSIKKLEKLFKNFDEYSSAGIFVKNGPAISTISKDIFGEWNVIRDKWNAEYDDIHLKKKAVVTEKYEDDRRKSFKKIGSFSLEQLQEYADADLSVVEKLKEIIIQKVDEIYKVYGSSEKLFDADFVLEKSLKKNDAVVAIMKDLLDSVKSFENYIKAFFGEGKETNRDESFYGDFVLAYDILLKVDHIYDAIRNYVTQKPYSKDKFKLYFQNPQFMRGWDKDKETDYRATILRYGSKYYLAIMDKKYAKCLQKIDKDDVNGNYEKINYKLLPGPNKMLPRVFFSKKWMAYYNPSEDIQKIYKNGTFKKGDMFNLNDCHKLIDFFKDSISRYPKWSNAYDFNFSETEKYKDIAGFYREVEEQGYKVSFESASKKEVDKLVEEGKLYMFQIYNKDFSDKSHGTPNLHTMYFKLLFDENNHGQIRLSGGAELFMRRASLKKEELVVHPANSPIANKNPDNPKKTTTLSYDVYKDKRFSEDQYELHIPIAINKCPKNIFKINTEVRVLLKHDDNPYVIGIARGERNLLYIVVVDGKGNIVEQYSLNEIINNFNGIRIKTDYHSLLDKKEKERFEARQNWTSIENIKELKAGYISQVVHKICELVEKYDAVIALEDLNSGFKNSRVKVEKQVYQKFEKMLIDKLNYMVDKKSNPCATGGALKGYQITNKFESFKSMSTQNGFIFYIPAWLTSKIDPSTGFVNLLKTKYTSIADSKKFISSFDRIMYVPEEDLFEFALDYKNFSRTDADYIKKWKLYSYGNRIRIFRNPKKNNVFDWEEVCLTSAYKELFNKYGINYQQGDIRALLCEQSDKAFYSSFMALMSLMLQMRNSITGRTDVDFLISPVKNSDGIFYDSRNYEAQENAILPKNADANGAYNIARKVLWAIGQFKKAEDEKLDKVKIAISNKEWLEYAQTSVKH

SEQ ID NO: 65 - protein, 1227 aa, Synthetic construct
SKLEKFTNCYSLSKTLRFKAIPVGKTQENIDNKRLLVEDEKRAEDYKGVKKLLDRYYLSFINDVLHSIKLKNLNNYISLFRKKTRTEKENKELENLEINLRKEIAKAFKGNEGYKSLFKKDIIETILPEFLDDKDEIALVNSFNGFTTAFTGFFDNRENMFSEEAKSTSIAFRCINENLTRYISNMDIFEKVDAIFDKHEVQEIKEKILNSDYDVEDFFEGEFFNFVLTQEGIDVYNAIIGGFVTESGEKIKGLNEYINLYNQKTKQKLPKFKPLYKQVLSDRESLSFYGEGYTSDEEVLEVFRNTLNKNSEIFSSIKKLEKLFKNFDEYSSAGIFVKNGPAISTISKDIFGEWNVIRDKWNAEYDDIHLKKKAVVTEKYEDDRRKSFKKIGSFSLEQLQEYADADLSVVEKLKEIIIQKVDEIYKVYGSSEKLFDADFVLEKSLKKNDAVVAIMKDLLDSVKSFENYIKAFFGEGKETNRDESFYGDFVLAYDILLKVDHIYDAIRNYVTQKPYSKDKFKLYFQNPQFMRGWDKDKETDYRATILRYGSKYYLAIMDKKYAKCLQKIDKDDVNGNYEKINYKLLPGPNKMLPRVFFSKKWMAYYNPSEDIQKIYKNGTFKKGDMFNLNDCHKLIDFFKDSISRYPKWSNAYDFNFSETEKYKDIAGFYREVEEQGYKVSFESASKKEVDKLVEEGKLYMFQIYNKDFSDKSHGTPNLHTMYFKLLFDENNHGQIRLSGGAELFMRRASLKKEELVVHPANSPIANKNPDNPKKTTTLSYDVYKDKRFSEDQYELHIPIAINKCPKNIFKINTEVRVLLKHDDNPYVIGIARGERNLLYIVVVDGKGNIVEQYSLNEIINNFNGIRIKTDYHSLLDKKEKERFEARQNWTSIENIKELKAGYISQVVHKICELVEKYDAVIALEDLNSGFKNSRVKVEKQVYQKFEKMLIDKLNYMVDKKSNPCATGGALKGYQITNKFESFKSMSTQNGFIFYIPAWLTSKIDPSTGFVNLLKTKYTSIADSKKFISSFDRIMYVPEEDLFEFALDYKNFSRTDADYIKKWKLYSYGNRIRIFRNPKKNNVFDWEEVCLTSAYKELFNKYGINYQQGDIRALLCEQSDKAFYSSFMALMSLMLQMRNSITGRTDVDFLISPVKNSDGIFYDSRNYEAQENAILPKNADANGAYNIARKVLWAIGQFKKAEDEKLDKVKIAISNKEWLEYAQTSVKH

SEQ ID NO: 66 - DNA, 3987 bp, Synthetic construct
  source 1..3987: mol_type = other DNA
atggccgggagcaagaagcgccggataaagcaggacacgcagttcgagggcttcaccaacctgtaccaagtctccaagacgctccggttcgagcttatcccgcaagggaagaccctgaaacacatccaggaacaaggtttcatcgaggaggacaaggcccgcaacgaccactacaaggagctcaagcccataatcgatcggatctacaagacgtacgccgaccagtgcctccaactggtgcagctcgactgggagaacctgagcgccgccattgacagctaccgcaaggaaaagacggaggagacgcgcaacgcccttattgaggagcaagccacctaccgcaacgccatccacgactacttcatcgggcgcaccgacaacctgacggacgcgatcaacaagcgccacgcggaaatctacaagggccttttcaaggccgagctcttcaacgggaaggtcctaaaacagctcgggactgtcacgacaaccgagcatgagaacgccctccttcgcagcttcgacaagttcaccacatacttctcgggcttctaccggaaccgcaagaacgttttcagcgccgaggacatctccaccgccatcccgcacaggatcgtccaggacaacttccccaagttcaaggagaactgccacatcttcacgcgcctgattacagccgtaccttcacttcgtgagcacttcgagaacgtcaaaaaggccatcgggatcttcgtctccacgtccatcgaggaggtattctctttcccgttctataaccagctcctgacccagacgcagatcgacctctacaaccagctactgggcggcatcagccgggaggccgggaccgagaaaataaagggcctcaacgaagttctcaacctggccatccagaagaacgacgagaccgcgcatatcatcgcatccctgccgcatcgcttcattcctttgttcaagcagatattgagcgaccggaacaccctctcgttcatcctcgaagaattcaagagcgacgaggaggtcattcagtctttctgcaagtacaagacgctcctacggaatgagaatgtgctggagaccgcggaggcactcttcaatgagctgaactccattgacctgacccacatcttcattagccacaagaaactggagacgatctccagcgccctgtgcgaccactgggacactctccgcaacgccctctacgaacgccggatctccgaacttaccggcaagataactaagtcggctaaggagaaggtgcaacggagcctcaagcacgaggacatcaaccttcaggaaatcatctcagccgcgggcaaggagctgagcgaggcgtttaagcagaaaacatcggagatactgagccacgcgcacgcggccctggatcaaccgctgccgacgactctcaagaagcaagaggagaaggaaatccttaagtcccagctcgactcgctgctcggcctctatcacttgctcgactggttcgcggttgatgagtccaacgaggtggacccggagttctccgcgcgcctcacgggtattaagctggagatggagccaagcttaagcttctacaacaaggcccgcaactacgcgaccaaaaaaccgtactcagtcgagaaattcaagctgaatttccagatgcctacattggcgagggggtgggacgtgaaccgcgagaagaacaatggagccatcctgttcgtcaaaaatgggttgtactacctgggcatcatgcccaagcagaagggccgttacaaggccctgtcattcgagcctaccgagaagacctcggagggcttcgacaagatgtactacgactatttcccggacgccgccaagatgatcccgaagtgctccacgcagctcaaagccgtcacggcccacttccagacgcataccacgccgatacttctgagcaacaacttcattgagccgctagagatcacgaaggagatatacgacctaaacaaccccgaaaaggagcccaagaagttccagacagcctacgctaagaagacaggtgatcagaagggatatagggaggcactctgcaagtggatcgacttcacgcgcgacttcctgtcgaaatatacaaagacgaccagcattgacctaagttctctccgcccatcctcccagtacaaggatctgggcgagtattatgcggagctgaacccattgctgtaccacatcagcttccagaggatcgccgagaaggagattatggacgcggtggagacggggaaactatacctgttccaaatatataacaaggacttcgctaaagggcaccacgggaagcccaacctgcacacactctactggacgggcttgttttcgccagaaaatttggccaagacttcgatcaagctcaacggccaggcggagttgttttaccgtcccaagtctcgcatgaagcgcatggcgcatcgcctcggagagaaaatgcttaacaagaagctcaaggatcagaagacgcccatacctgatacgttgtaccaggaattgtacgactacgtgaaccaccgcctatcgcacgacctctcagacgaggcccgcgccctcctcccaaacgtgattactaaggaggtttcccatgaaataatcaaggaccgacggttcaccagcgacaaattttttttccacgtgcctatcacgctcaattaccaggcggccaactccccatcgaagttcaaccagcgcgtgaacgcctaccttaaggagcacccggagaccccaatcatcgggatcgaccgtggcgagcggaacctgatctatattacggtgatcgatagcaccgggaagatcctggagcagcgctccctgaacacaatccagcagtttgactaccagaagaaactcgacaaccgggagaaggagcgcgtcgcagcccggcaagcatggagtgtggtcggcaccataaaggacctgaaacagggttacctaagtcaagttatccacgagatcgttgacctgatgatacactatcaagccgtagtcgtgctggagaacctcaacttcgggtttaagtccaagcgcaccggcatcgcggagaaggcggtgtaccagcagttcgagaagatgctgatcgacaagctgaactgcctggtgctcaaggactaccctgcggagaaggtcggcggggtcttgaacccgtaccagctaaccgaccagttcacgagcttcgccaaaatgggcacgcagtccggattcttgttttatgtcccggctccatatacaagtaagatcgacccgctgacagggtttgttgacccattcgtgtggaagaccatcaagaaccacgagagcaggaaacacttcttagagggcttcgacttcctgcattacgacgttaagacaggcgacttcatcctgcacttcaagatgaaccgcaacctgtcgttccagaggggcctgcccggcttcatgcccgcctgggatatcgtctttgagaagaatgagacgcagttcgacgcgaaggggacgccgttcatcgctggaaagcggatcgtgccggtcatcgagaaccaccgcttcacgggtcgctaccgagatttataccccgccaacgaactaattgcgctgctggaggagaaggggatcgtgttccgagatggcagcaacattctcccgaagctgctggagaacgacgactcgcacgctattgacacgatggtcgccctcatacggagcgtgcttcagatgcggaacagtaacgctgccacgggcgaggactacattaactcccccgtccgcgacctcaacggggtctgcttcgatagccgcttccagaacccggagtggcctatggatgcggacgcgaacggggcctaccacatcgccctcaagggccaactcctgctcaaccacttgaaggaaagcaaagacctcaaattgcagaatggcatcagtaaccaggactggctcgcgtacatccaggaactgagaaacgggtccaagaagcggcgtatcaagcaagattga

SEQ ID NO: 67 - DNA, 3987 bp, Synthetic construct
  source 1..3987: mol_type = other DNA
atggcgggaagcaaaaagcgccggattaagcaagacacgcagttcgagggcttcacgaacctctaccaagtcagcaagaccctccggttcgagctgataccacagggaaagacgctcaagcacatccaggaacagggcttcatcgaggaggacaaggcgcgcaacgaccactacaaggagttgaaaccgatcatcgaccgcatctacaagacgtacgccgaccagtgcctccagctcgtgcagctcgactgggagaacctctccgccgccattgactcgtaccggaaggagaagactgaggagacccgcaacgccctgatcgaggagcaagcaacctaccggaacgccatccacgactacttcatcggccgcaccgacaacctcaccgacgcgatcaacaagcggcacgcggagatatacaaagggctgttcaaggcggagctgttcaacggcaaggtgctcaagcagctagggacggtgaccacgaccgagcacgagaacgcgctcctccgcagcttcgacaagttcaccacctacttcagcggcttctaccggaaccgcaagaatgtgttcagcgcggaggacatcagcacggccatcccgcaccgcatcgtccaggacaacttcccgaagttcaaggagaactgccacatcttcacccgcctgataaccgccgtcccctccctgcgggagcacttcgagaacgtcaaaaaggcaattgggatcttcgtctcgaccagcattgaggaggtgttcagcttccccttctacaaccagctcctcacccagacgcagatcgacctgtacaatcagttgctcggcgggataagccgcgaggcgggaaccgaaaaaatcaaggggctgaacgaagtgttgaacctcgccatccagaagaacgacgagaccgcgcacatcatcgcctccctgccccaccggttcatcccgctgttcaagcagatcctctctgaccggaacaccctgtccttcattcttgaggagttcaagtcggacgaggaggtcatccagagcttctgcaagtacaagacgctgctacggaacgagaacgtgctggagacggcggaggcactgttcaacgagctaaacagcatcgacctcacgcacatcttcatcagtcacaagaaactggagaccatctcctccgcgctgtgcgaccactgggacacgctcaggaacgcgctctacgagcgccgaatcagtgagctgacgggcaagatcacgaagtccgcgaaggagaaggtgcagcggtccctcaagcacgaggacatcaacctccaggagatcatctcagcggctgggaaagagctgtccgaggcgttcaagcagaaaacgagcgaaatcctgtcccacgcgcacgcggccctggatcagcctctgccgacgaccctcaagaaacaagaagaaaaggaaatcctcaagtcgcagctcgactcgctgctgggcctgtaccatctcctcgactggttcgccgtggacgagagcaacgaggtggaccccgagttctccgcgcggcttacggggatcaagctggagatggagcccagcctgtccttctacaacaaggcgcgcaactacgccaccaagaagccctacagcgtggagaagttcaagctcaacttccagatgcccactctcgcacgtgggtgggacgtcaaccgcgaaaaaaataatggggcgatcctgttcgtcaagaacggcctgtactacttgggcatcatgccgaaacagaagggccgctacaaggccctgagcttcgaaccgaccgagaaaacgagcgaggggttcgacaagatgtactacgactacttccccgacgccgcgaagatgattccaaagtgctccacgcagcttaaggccgtgacggcccacttccagacgcacacgaccccgatcctcctcagcaacaacttcatcgagcccctggagatcacgaaggagatatacgacctgaacaacccggagaaggagcccaagaaattccagaccgcctacgccaagaagacaggcgaccaaaagggttacagggaggccctctgcaagtggatcgacttcactagggacttcctgtccaagtacaccaagactacctctatcgacctgtccagcctccgcccgtcgtcccagtacaaagatttgggcgagtattacgcggagctgaacccactgctctaccacatcagcttccagcgcatcgcggagaaggagatcatggacgcagtggagacgggcaagctatacctatttcagatatacaacaaagacttcgctaagggacaccacggcaagcctaacctgcacaccctctactggacggggctcttcagcccggagaacctcgccaagacctcgatcaagctcaacggccaggccgagctgttctaccggcccaagtcccgcatgaagcggatggcccaccggctcggggagaaaatgctcaacaagaaattgaaggaccaaaaaacgccgatacccgacaccctataccaggagctgtacgactatgtgaaccaccgcctgagccacgacctcagcgacgaggcgcgggccctcctgccgaacgtcatcacaaaggaggtcagccacgagatcatcaaggaccggcgcttcacctccgacaagtttttctttcacgtgcccatcacgctcaactaccaggccgccaactcgccgtccaagttcaaccagcgcgtgaacgcctacctcaaggagcaccccgagaccccgatcatcgggattgaccgaggggagcggaacctcatctacatcaccgtcatcgacagcaccgggaagatccttgaacagcggtcgctcaacaccatccagcagttcgactaccagaagaaactcgacaaccgggagaaggagagagtggcggcccgccaggcttggtccgtcgtcgggacgattaaggacttgaaacaaggttacctgtcgcaagtgatccacgagatcgttgacctgatgatccactaccaagccgtcgtggtcctggagaacctcaacttcggcttcaagagcaaacgaaccggcatcgcggagaaggccgtgtaccagcagttcgaaaaaatgctgatcgacaagctgaactgcctcgtgctcaaggactaccccgctgagaaggtcggcggggtgctgaacccgtaccagctcactgaccagttcaccagcttcgcaaagatgggcacccagtccggcttcctgttctacgtgcctgcgccatacacctcgaagatcgacccgctcaccgggttcgtggaccccttcgtctggaagaccatcaagaaccacgagagccgcaagcacttcctggagggcttcgacttcctccactacgacgtcaagaccggggacttcatcctgcacttcaagatgaaccgcaacctcagtttccagcgcggcctgccggggttcatgcccgcttgggatatagtcttcgagaagaatgagacgcagttcgacgcgaagggcaccccgttcatcgccgggaagcgcatcgtgccggtcatcgagaaccaccggttcaccgggcgctaccgcgacctatacccggcgaacgagttgatcgccctcctggaggagaagggcatcgtgttccgcgacggctccaacatcctcccgaagctgctcgaaaacgacgactcccacgccatcgacacgatggtcgcgctgatccggtcggtgctccagatgcggaactccaacgccgcgacgggcgaggactacatcaacagtccggtccgcgatctgaacggcgtctgcttcgactcccggttccagaaccccgagtggccgatggacgcggacgcgaacggcgcataccacatcgccctaaaagggcaattgctgctcaaccacctcaaggaatccaaagacctaaagctccagaacggcatctccaaccaggactggctggcgtacatccaggaactgcggaacgggagcaaaaaacgtcggatcaagcaagattga

SEQ ID NO: 68 - DNA, 3987 bp, Synthetic construct
  source 1..3987: mol_type = other DNA
atggcgggctccaagaaacgccggattaagcaagatacccagttcgaggggttcacgaacctctaccaagtgagcaagaccctccgattcgaactgattcctcaggggaagaccctcaagcacatccaggagcaagggttcatcgaggaggacaaggcgcggaacgaccactacaaggaactcaaacccatcatcgaccgcatctacaagacctacgccgatcagtgcctccagctcgtgcagttggactgggagaacctcagcgcggccattgactcctaccggaaggagaaaacggaggagacgcgcaacgcgctcatcgaggaacaggcaacctatcgcaacgccatccacgactacttcatcgggaggactgacaacctcactgacgcgattaacaagcgccacgcggagatatacaagggactcttcaaagcggagctgtttaacggcaaggttctcaagcaactcggcactgtgaccacgaccgagcatgagaacgccctgctccgctccttcgacaagttcaccacctacttctccgggttctaccgcaaccgcaagaatgtcttcagcgcggaggacatcagcacggccattccacatcgaatcgtccaagataacttcccgaagttcaaggagaactgccacatcttcacccgactcattactgctgtaccgtcgttacgcgaacacttcgagaacgtcaagaaggcaattggaatcttcgtctctacgtcaatagaggaggtgttcagcttccctttctacaaccagctccttacgcagacccagatagacctgtacaatcagctcctcggtgggatcagccgggaggcggggactgagaagattaaagggctcaacgaggtcttgaacctggccatccaaaaaaacgatgagacggcgcacatcatcgcctcgctgccccaccggttcatcccgctgttcaagcagatcctcagtgacaggaacaccttgagctttatcctagaggagttcaagagcgacgaggaggtgatccagagcttctgcaagtacaaaaccctgctgaggaacgagaacgtcctggagacggcggaggcgctgttcaacgagctgaactctatcgacttaactcacatattcatctcgcacaagaagctggagactattagctctgcactctgcgaccactgggacaccctccgcaacgcgctctacgagcgccgcatctcggagctgaccgggaagatcaccaaatccgcgaaggaaaaggtccagcgttccctcaaacacgaggatattaacttacaggagattatctcagcggctgggaaggagttgtcagaggcgttcaagcagaaaacttccgagatcctgagccacgcgcacgcagcgctcgaccagcctctgcccaccaccctcaaaaagcaggaagaaaaagagatcctcaagagccagttggactccctgctggggctctatcaccttctcgactggttcgccgtcgatgagtcgaacgaggtggaccccgagttctccgcccggctgaccggcatcaagctagagatggagccgtccctcagcttctacaataaggcccgcaactacgcgaccaaaaaaccctacagcgtggagaagttcaagctgaacttccagatgccgaccttagcacgcggttgggacgtaaacagggagaagaacaatggagccatcctgttcgtcaagaacgggctttactacctcgggataatgcccaagcagaagggccgctacaaggccctttccttcgagccgacggagaaaacctccgaggggttcgacaagatgtactacgactacttccccgacgccgccaagatgatcccgaagtgctcaacgcagctaaaagccgtgaccgcccacttccagacccacacgacgccgatcctgctgagcaacaacttcatcgagccccttgagatcactaaggagatatacgacctgaacaaccccgagaaggagcccaagaagtttcaaaccgcctacgccaaaaaaactggcgaccaaaagggctacagggaggcgctgtgtaagtggatcgacttcacacgcgacttcctttcgaagtatacgaagacaacctctattgacctgagcagcctgcgtcctagctcccagtacaaagatttgggcgagtactacgcggagcttaatccactactctaccacatctcattccagcgcatcgctgagaaggaaatcatggacgcggtggagacaggcaaactgtacctcttccagatatacaacaaagacttcgctaaggggcaccacgggaagcccaaccttcatacgctctactggacgggcctattcagccccgaaaatctggccaagacctccatcaagctgaacggccaagcggagctgttctacagacccaagagccggatgaagcggatggcccacaggctcggcgagaaaatgcttaacaaaaagttgaaggaccagaaaacccctatccccgacaccctctaccaggaactgtacgactacgtgaaccacaggctctcgcacgacctttccgacgaggcccgtgccctactcccgaacgtcattaccaaagaggtttcgcacgagatcatcaaggaccggcggttcacgagcgacaagtttttctttcacgtccccatcacccttaactaccaggcggccaactccccatccaagttcaaccagcgtgtgaatgcctacctcaaggagcacccagagaccccgatcattgggatcgaccggggcgagcggaacctgatctacatcaccgtcatcgactcgacgggcaagattcttgagcagagatcgttgaataccatacagcagttcgactaccagaagaaactcgacaaccgcgagaaggagcgcgtggcggcccgccaggcgtggtccgtcgttgggacgattaaggacttgaaacaaggttatctgtcccaagtcatccacgagatcgttgatctgatgatccactatcaggcagtggtggtgctggagaatctcaacttcggcttcaagagtaagcggacgggaatcgccgagaaggccgtgtaccagcagttcgagaagatgctgatcgacaagctcaactgccttgtgctgaaagactacccggccgagaaggtcggcggcgtcctcaacccgtaccaacttaccgaccagttcacctccttcgccaagatgggcactcagtccgggttcttgttctacgtccccgcaccttacacctctaagatcgaccctctgactggcttcgtagatccattcgtgtggaagaccattaagaaccacgagagccgcaagcacttcctggagggcttcgacttcctgcactacgacgtgaagaccggggacttcatccttcacttcaagatgaaccggaacctcagcttccagcggggcctgccggggttcatgcccgcctgggacatcgtgttcgagaagaacgagacccagttcgacgcgaagggcacgcccttcatcgccgggaagcgtatcgtgccggtgatcgagaaccatcgtttcacgggtcgctaccgtgacctctacccggcgaacgagcttatcgcactcctggaggagaagggcatcgtcttccgggacggctccaacatcctcccgaaactgctggaaaacgacgactctcacgccatcgacacgatggtggccctcatccggtccgtgctccaaatgcggaacagcaacgccgccaccggtgaggactacatcaacagcccggtccgggatctgaacggggtgtgcttcgattcgcggttccagaatcctgagtggccgatggacgcggatgcaaacggggcgtaccacatcgcgctcaagggccagttacttctgaaccaccttaaggagtctaaagatttgaaactccagaacgggatctcgaaccaggactggctggcctacatccaagagttgcggaacggcagcaagaagcggcggattaagcaagattag

SEQ ID NO: 69 - protein, 1129 aa, Alicyclobacillus acidoterrestris
MAVKSIKVKLRLDDMPEIRAGLWKLHKEVNAGVRYYTEWLSLLRQENLYRRSPNGDGEQECDKTAEECKAELLERLRARQVENGHRGPAGSDDELLQLARQLYELLVPQAIGAKGDAQQIARKFLSPLADKDAVGGLGIAKAGNKPRWVRMREAGEPGWEEEKEKAETRKSADRTADVLRALADFGLKPLMRVYTDSEMSSVEWKPLRKGQAVRTWDRDMFQQAIERMMSWESWNQRVGQEYAKLVEQKNRFEQKNFVGQEHLVHLVNQLQQDMKEASPGLESKEQTAHYVTGRALRGSDKVFEKWGKLAPDAPFDLYDAEIKNVQRRNTRRFGSHDLFAKLAEPEYQALWREDASFLTRYAVYNSILRKLNHAKMFATFTLPDATAHPIWTRFDKLGGNLHQYTFLFNEFGERRHAIRFHKLLKVENGVAREVDDVTVPISMSEQLDNLLPRDPNEPIALYFRDYGAEQHFTGEFGGAKIQCRRDQLAHMHRRRGARDVYLNVSVRVQSQSEARGERRPPYAAVFRLVGDNHRAFVHFDKLSDYLAEHPDDGKLGSEGLLSGLRVMSVDLGLRTSASISVFRVARKDELKPNSKGRVPFFFPIKGNDNLVAVHERSQLLKLPGETESKDLRAIREERQRTLRQLRTQLAYLRLLVRCGSEDVGRRERSWAKLIEQPVDAANHMTPDWREAFENELQKLKSLHGICSDKEWMDAVYESVRRVWRHMGKQVRDWRKDVRSGERPKIRGYAKDVVGGNSIEQIEYLERQYKFLKSWSFFGKVSGQVIRAEKGSRFAITLREHIDHAKEDRLKKLADRIIMEALGYVYALDERGKGKWVAKYPPCQLILLEELSEYQFNNDRPPSENNQLMQWSHRGVFQELINQAQVHDLLVGTMYAAFSSRFDARTGAPGIRCRRVPARCTQEHNPEPFPWWLNKFVVEHTLDACPLRADDLIPTGEGEIFVSPFSAEEGDFHQIHADLNAAQNLQQRLWSDFDISQIRLRCDWGEVDGELVLIPRLTGKRTADSYSNKVFYTNTGVTYYERERGKKRRKVFAQEKLSEEEAELLVEADEAREKSVVLMRDPSGIINRGNWTRQKEFWSMVNQRIEGYLVKQIRSRVPLQDSACENTGDI

SEQ ID NO: 70 - DNA, 4101 bp, Synthetic construct
  source 1..4101: mol_type = other DNA
gacaagaagtactccattggcctggcgattgggacaaactcggtggggtgggccgtgattacggatgagtacaaggttccaagcaagaagttcaaggtcctcgggaacacagatcggcattcgattaagaagaatctcattggggcgctcctcttcgactcgggggagacagcggaggctaccaggctcaagcggacagccaggcggcggtacacaaggcggaagaatcgcatctgctacctccaggagattttctcgaatgagatggcgaaggtggacgacagcttcttccatcggctggaggagtccttcctggtggaggaggataagaagcacgagaggcatccaattttcgggaacatcgtggacgaggttgcgtaccatgagaagtaccctacaatctaccatctgcggaagaagctggttgactccacagacaaggcggacctgaggctgatctacctcgctctggcccacatgattaagttccgcgggcatttcctgatcgagggggacctgaatcccgacaattcggatgtggacaagctcttcatccagctggtgcagacctacaaccagctgttcgaggagaatcccatcaatgcgtcgggcgttgacgctaaggccattctgtccgctaggctgtcgaagagcaggaggctggagaacctgatcgcccagctgccaggcgagaagaagaatgggctcttcgggaatctgattgcgctctccctggggctgacaccgaacttcaagagcaatttcgatctggctgaggacgcgaagctccagctctcgaaggacacttacgacgatgacctcgataacctcctcgcgcagatcggggaccagtacgctgatctcttcctcgccgctaagaacctctcggatgctatcctgctctccgacattctccgggttaataccgagattacaaaggccccactgtcggcgtccatgatcaagcggtacgatgagcatcatcaggatctcaccctgctcaaggccctcgtgcggcagcagctgcccgagaagtacaaggagattttcttcgaccagagcaagaatgggtacgctggctacattgacggcggggcctcacaggaggagttctacaagttcatcaagccaatcctggagaagatggatgggacagaggagctgctggtgaagctcaaccgggaggatctgctcaggaagcagcggacgttcgacaacgggtcgattccccatcagatccacctgggggagctgcacgcgatcctgcgccggcaggaggatttctaccctttcctgaaggataatcgggagaagatcgagaagattctcaccttccggattccctactacgtcgggccactcgcgcggggcaatagcaggttcgcctggatgacacggaagagcgaggagacaatcaccccctggaacttcgaggaggttgtcgacaagggggcgtccgcccagtcattcattgagcggatgaccaatttcgacaagaatctgccaaatgagaaggttctcccaaagcatagcctcctctacgagtacttcactgtttacaacgagctgaccaaggtgaagtatgtgaccgagggcatgcggaagcccgcgttcctgtccggcgagcagaagaaggccattgtggacctcctgttcaagaccaatcgcaaggtcacagtcaagcagctcaaggaggattacttcaagaagatcgagtgcttcgactcggttgagattagcggggtggaggatcggttcaacgcgagcctcggcacttaccacgacctcctgaagatcatcaaggataaggacttcctcgacaacgaggagaacgaggatattctggaggacatcgtgctcaccctgacgctgttcgaggatcgggagatgatcgaggagcgcctgaagacctacgctcatctcttcgatgataaggtcatgaagcagctgaagaggaggcggtacaccgggtggggccgcctgagcaggaagctcattaacgggatcagggacaagcagagcggcaagaccatcctggacttcctcaagagcgatggcttcgccaaccggaatttcatgcagctcatccacgacgactccctcaccttcaaggaggacattcagaaggctcaggtcagcggccagggcgactcgctgcatgagcacatcgctaacctggcgggcagcccagccatcaagaagggcatcctccagacagtgaaggtcgtggatgagctggtgaaggtcatgggccggcataagcccgagaatattgtgattgagatggcgcgggagaatcagaccactcagaagggccagaagaactcgcgggagcgcatgaagaggatcgaggaggggattaaggagctgggcagccagattctcaaggagcaccccgtggagaatacccagctccagaacgagaagctgtacctctactacctccagaatgggcgggacatgtatgttgatcaggagctggacatcaatcgcctctcggattacgacgtggaccacatcgtgccccagagcttcctgaaggatgatagcatcgacaataaggtcctgacccgctccgacaagaatcgcggcaagagcgacaacgtgccgagcgaggaggtcgtgaagaagatgaagaactactggcggcagctgctgaacgcgaagctcattacacagcggaagttcgataacctgacgaaggcggagaggggcggcctctccgagctggacaaggcgggcttcattaagaggcagctcgtggagactcgccagatcaccaagcacgtggctcagatcctcgatagccggatgaatacgaagtacgatgagaatgacaagctcatccgggaggtgaaggtaatcaccctgaagtcaaagctcgttagcgatttccggaaggacttccagttctacaaggtgcgggagattaacaactaccatcatgcgcacgatgcgtacctcaatgcggtggtgggcacagccctgattaagaagtaccccaagctggagagcgagttcgtctacggggactacaaggtgtacgatgttcggaagatgatcgccaagagcgagcaggagattgggaaggccaccgctaagtacttcttctactcgaatattatgaatttcttcaagaccgagatcacactcgctaatggggagattcggaagcggcccctcatcgagactaacggggagactggcgagattgtgtgggacaaggggcgcgacttcgctaccgtgcgcaaggtcctctcgatgccccaggttaatattgttaagaagacagaggtgcagacgggcgggttctccaaggagtctatcctgccgaagcggaactcggacaagctgatcgcccgcaagaaggattgggaccccaagaagtacgggggattcgatagcccaaccgtggcttacagcgtcctggtggtcgccaaggttgagaaggggaagtcgaagaagctcaagagcgttaaggagctgctgggcatcaccatcatggagcggtccagcttcgagaagaatcctatcgacttcctggaggctaaggggtacaaggaggtcaagaaggacctgatcattaagctgcccaagtactctctgttcgagctggagaacgggaggaagcggatgctggcgtctgctggcgagctacagaagggcaatgagctggcgctcccctcgaagtatgtcaacttcctctacctggcttcccattacgagaagctgaagggctcgcccgaggataatgagcagaagcagctcttcgtggagcagcacaagcactacctcgacgagatcattgagcagatttcggagttctcgaagcgggtcattctcgcggacgcgaacctcgacaaggtcctctcggcgtacaacaagcaccgggacaagcccatccgggagcaggccgagaacattatccacctcttcacactgaccaacctcggcgctcccgccgcgttcaagtacttcgacaccaccattgaccgcaagagatacacatccaccaaggaggtgctggacgcgaccctcatccaccagagcatcacaggcctctacgagacacggatcgacctctcgcagctcgggggcgat

SEQ ID NO: 71 - DNA, 4092 bp, Synthetic construct
  source 1..4092: mol_type = other DNA
gacaagaagtactcgatcggcctggcgattggcacaaacagcgtggggtgggctgtgatcactgatgagtacaaggtgccatcgaagaagttcaaggtgctggggaatacagaccggcattcgatcaagaagaatctcattggcgctctcctcttcgattccggcgagactgctgaggcgacccgcctgaagcgcaccgcccggcggcgctacactcggcggaagaataggatttgctacctccaggagattttctcgaatgagatggccaaggtggatgacagcttcttccaccgcctggaggagtcgttcctggtcgaggaggacaagaagcatgagcggcaccctatcttcgggaatatcgttgatgaggtcgcctaccacgagaagtaccccactatctaccatctccgcaagaagctcgtggacagcacagataaggccgacctccgcctgatctacctcgccctcgcgcacatgattaagttccgggggcacttcctcattgagggggatctgaatcccgataactccgacgtggacaagctgttcatccagctggtgcagacatacaaccagctgttcgaggagaatcccatcaacgcgagcggcgtggacgctaaggccattctgtcggctaggctctcgaagtcgaggcggctggagaacctgattgcgcagctccccggcgagaagaagaacgggctgttcgggaatctcatcgccctctccctcggcctcacaccaaacttcaagagcaatttcgacctggctgaggacgctaagctgcaactctcaaaggatacatacgatgacgacctggacaatctcctggctcagatcggcgaccagtacgctgacctgttcctcgcggccaagaatctgtcggacgcgattctcctcagcgacatcctgcgcgtcaataccgagattacgaaggctccactgtctgcgtcaatgattaagcggtacgatgagcatcaccaggatctgaccctcctgaaggcgctcgtgcggcagcagctgcccgagaagtacaaggagattttcttcgatcagagcaagaatggctacgccggctacatcgacgggggcgcgagccaggaggagttctacaagttcatcaagcccatcctggagaagatggacggcaccgaggagctactcgtgaagctcaatcgggaggatctcctccggaagcagcggacattcgataacgggtctatcccacaccagatccacctcggcgagctgcatgcgattctgcggcggcaggaggatttctaccctttcctgaaggacaaccgggagaagatcgagaagatcctcacattccggattccatactacgtcggccccctggcgaggggcaatagccggttcgcgtggatgacaaggaagtccgaggagactattaccccgtggaatttcgaggaggtggttgacaagggcgcttccgcgcagagcttcattgagcggatgacaaacttcgacaagaatctccccaacgagaaggtcctgccgaagcatagcctcctgtacgagtacttcaccgtctacaatgagctaactaaggtcaagtatgtgacagagggcatgaggaagccagccttcctctcaggcgagcagaagaaggccattgtggacctcctgttcaagacaaaccgcaaggtgacagtgaagcagctgaaggaggattacttcaagaagattgagtgcttcgactcagtggagatttcaggcgtggaggatcggttcaacgcgagcctggggacttaccacgacctgctgaagattattaaggacaaggacttcctggataacgaggagaatgaggacatcctggaggatattgtgctcaccctcaccctgttcgaggacagggagatgattgaggagaggctcaagacctacgcgcacctgttcgatgacaaggtcatgaagcagctgaagaggcggcgctacactgggtggggccgcctgtcgcggaagctgatcaacggcattcgggataagcagtccgggaagaccattctggatttcctgaagtcggacggcttcgccaacaggaatttcatgcagctgatccacgacgactccctcaccttcaaggaggacattcagaaggcccaggttagcggccagggggactcactccacgagcatattgccaatctggccggctctccagctatcaagaagggcatcctgcaaacagttaaggttgttgacgagctggttaaggtcatggggcggcataagcccgagaacattgtcatcgagatggctcgggagaaccagacaactcagaagggccagaagaactccagggagcgcatgaagcggattgaggagggcattaaggagctggggtcccagatcctcaaggagcaccctgtcgagaacactcagctgcaaaacgagaagctctacctgtactacctccagaacgggcgggatatgtatgtggatcaggagctggacatcaacaggctctccgactacgacgtggatcacattgtcccacagtctttcctcaaggatgattccatcgacaacaaggtgctgacgcgcagcgacaagaatagggggaagtcggacaacgttccgagcgaggaggtcgtgaagaagatgaagaattactggaggcagctcctgaatgcgaagctgatcactcagaggaagttcgacaatctgacaaaggcggagaggggcgggctctcggagctggataaggcgggcttcatcaagcggcagctcgttgaaacccggcagatcaccaagcatgtcgcccagatcctcgatagccgcatgaacaccaagtacgatgagaacgacaagctcattcgggaggttaaggtcattacgctgaagtccaagctcgtcagcgacttcaggaaggatttccagttctacaaggttcgggagattaacaactaccaccacgcgcatgatgcgtacctgaacgctgttgtcggcactgctctcatcaagaagtacccaaagctggagtccgagttcgtctacggggactacaaggtctacgatgtccggaagatgatcgccaagtcggagcaggagatcgggaaggctactgcgaagtacttcttctacagcaacattatgaatttcttcaagacggagattacgctggcgaacggggagattaggaagaggcccctcattgagactaatggggagacaggcgagattgtttgggacaagggccgcgacttcgcgactgtgcggaaggtcctgtccatgccacaggtgaatattgttaagaagacagaggtgcagactgggggcttctcgaaggagagcattctcccaaagcggaacagcgataagctcatcgcgcgcaagaaggattgggaccctaagaagtacggcggcttcgattctcccactgtggcctactccgttctcgtggttgccaaggttgagaaggggaagtcgaagaagctgaagtcggtcaaggagctgctcgggattacaatcatggagcggagcagcttcgagaagaaccctattgatttcctggaggccaagggctacaaggaggttaagaaggatctcattatcaagctccctaagtactctctgttcgagctggagaatggccggaagaggatgctggcctcggctggcgagctacagaaggggaatgagctggccctcccgtcgaagtatgtgaatttcctgtacctcgcgtcgcactacgagaagctcaagggcagcccggaggataatgagcagaagcagctcttcgtggagcagcataagcactacctggacgagatcattgagcagatcagcgagttctcgaagcgggttattctggctgatgctaacctggacaaggttctgagcgcctacaataagcatcgcgacaagccgattcgcgagcaggcggagaatattatccacctgttcaccctcactaacctcggggctcccgcggccttcaagtacttcgataccacaatagataggaagcggtacacctcgacgaaggaggtcctcgacgccacactcatccatcagtcgattacaggcctgtacgagacacggattgacctctcgcagctg

SEQ ID NO: 72 - DNA, 4101 bp, Synthetic construct
  source 1..4101: mol_type = other DNA
gacaagaagtattccataggcctggctatcggcaccaacagcgtgggctgggccgtcatcaccgacgagtacaaagtgccgagtaaaaagttcaaagtgctcggcaacaccgaccgccactccataaagaaaaacctgatcggggcgctcctgttcgacagcggcgagacggcggaggccacccgcttgaaacgcacggcccgacggcgctacacgcggcgcaagaaccggatctgttacctacaggagattttctctaacgagatggcgaaggtggacgactcgttctttcaccgcctcgaagagtccttcctcgtggaggaggacaagaaacacgagcgccacccgatcttcggcaacatcgtggacgaggtggcctaccacgagaagtacccgaccatctaccacctccggaagaaactcgtggacagcacggacaaggccgacctgaggctcatctacctcgccctggcgcacatgattaagttccggggccacttcctgatcgagggcgacctgaacccggacaacagcgacgtggacaagctgttcatccagctagtccagacctacaaccagcttttcgaggaaaaccccatcaacgccagcggggtggacgcgaaggcgatcctgtccgcccggctgagcaagtcccggcggctggagaacctcatcgcgcagttgcccggcgagaagaagaacgggctgttcgggaacctgatcgccctctccctggggctcaccccgaacttcaagtccaacttcgacctcgccgaggacgccaaactacagctgagcaaggacacctacgacgacgacctcgacaacctgctggcccagatcggggaccagtacgcagacctgttcctcgccgccaagaacctctccgacgccatcctgctgtcggacatcctgcgggtgaacacggagatcacgaaggccccgctctcggcctcgatgattaaacgctacgacgagcaccaccaggacttgaccctcctcaaggcgctggtccgccagcagcttcccgagaagtacaaggaaatctttttcgatcagagcaagaacgggtacgccgggtacatcgacggcggggcgtcccaggaggagttctacaagttcatcaagcccatcctggagaaaatggacgggaccgaggagctgctcgtgaagctcaaccgcgaagatttgctccgcaagcagcgcacgttcgacaacgggtcgatcccgcaccagatccacctgggcgagctgcacgcgatcctcaggcgtcaggaagacttctaccccttcctcaaggacaaccgcgagaagatagagaagattctgaccttcagaattccttattacgtgggcccgctggctcggggcaactcgcgcttcgcctggatgacgcgcaagtccgaggagaccatcaccccgtggaacttcgaggaggtggtggataagggtgcctcggcccagtccttcatcgagcggatgaccaacttcgacaagaacctgccgaacgagaaggtgctccccaagcacagcctgctctacgaatatttcacggtgtacaacgagctgacgaaggtcaagtacgtgaccgagggaatgaggaaacctgcattcctctccggggagcagaagaaagccatagtcgacctcctgttcaagaccaaccggaaggtcaccgtcaagcagctcaaggaggactacttcaagaagatcgagtgcttcgattcagtggagatcagcggcgtcgaggaccggttcaacgccagcctgggcacctaccacgacctgctcaagatcatcaaggacaaggacttcctcgacaacgaggagaacgaggacatcctggaggacatcgtgctgaccctgacgctcttcgaggaccgcgagatgatcgaggagcgcctcaagacctacgcccacctgttcgacgacaaggtgatgaagcagctcaagcggcggagatatactgggtggggccgcctctcccggaagctcattaacggtatcagggataagcagtccgggaagacgatcctcgacttcctcaagtcggacgggttcgccaaccgcaacttcatgcagctcatccacgacgactccctgacgttcaaggaggacatccagaaggcccaagtgtctggtcaaggtgactcgctccacgagcacatcgccaacctcgcgggcagcccggccatcaagaagggaatactccagaccgtcaaggtggtggacgagctggtgaaggtcatgggccgccacaagccggagaacatcgtcatcgagatggcgcgggagaaccagaccacgcagaaggggcagaaaaatagccgtgagcgcatgaagcgcatcgaggaggggattaaggagttgggcagccagatcctcaaggagcaccctgtggagaacacgcagttgcaaaacgagaagctctacctgtactacctccagaacgggagggatatgtacgtggaccaagaactggacatcaaccgcctgtccgactacgacgtggaccacatcgtgccgcagagcttcctcaaggacgacagcatcgacaacaaggtgctcacccggtccgacaagaatcggggcaagtccgacaacgtgcccagcgaggaggtcgtcaaaaagatgaaaaactactggcgacaactactgaacgccaagctcatcacccagcgcaagttcgacaacctcacaaaagccgagcgcggcgggttgagcgagctggacaaggccgggttcatcaagcgccagctcgtcgagacgcgccagatcacgaagcacgtcgcgcagatactcgacagccggatgaacaccaagtacgacgagaacgacaagctcatccgggaggtgaaggtcatcaccctcaagtcgaagctcgtgagcgacttccgcaaggacttccagttctacaaggtccgggagatcaacaactaccaccacgcccacgatgcttatcttaacgccgtggtggggacggccctcattaagaaatacccgaagctggagtcggagttcgtgtacggcgactacaaggtgtacgacgtcaggaagatgatcgccaagtccgaacaggagatcgggaaggccacggcgaaatacttcttctacagcaacatcatgaacttcttcaagaccgagatcaccctcgccaacggcgagatccgcaagcgcccgctcatcgagacgaacggggagaccggcgagatcgtctgggacaaggggcgcgacttcgccactgtgcggaaggtgctgtcgatgccccaggtcaacatcgtcaagaagacggaggtccagacgggcgggttcagcaaggagagcatcctgccgaagcgcaacagcgacaagctgatcgcccgcaaaaaggactgggatccaaaaaagtacggcggcttcgacagccccaccgtcgcctacagcgtcctcgtcgtcgctaaagtcgagaagggcaagtccaaaaagctcaagagcgtcaaggagctgctcgggatcaccatcatggagcggtccagcttcgagaagaacccaattgatttcctggaggcgaagggctacaaggaggtcaagaaagacctcatcataaagctgccgaagtactcactcttcgagctggagaacgggcgcaagcggatgctggcgtcggccggagagctccaaaagggcaacgagctggcgctgccgagcaagtacgtgaacttcctctacctggcgtcccactacgagaagctcaagggcagtccagaggataacgagcagaagcagctattcgtggagcagcacaagcactacctggacgagatcatcgagcagatcagcgagttctccaagcgcgtcatcctggcggacgccaacctggacaaggtgctgtccgcgtacaacaagcaccgcgacaagccgatccgcgagcaagccgagaacatcatccacctgttcaccctcacgaacctcggggcacccgccgccttcaaatatttcgacacgaccatcgaccgcaagcgctacaccagcacgaaggaggtgctcgacgccaccctgatccaccagagcatcaccgggctgtacgagacccgcatcgacctctcgcagctcggcggggac

SEQ ID NO: 73 - DNA, 4101 bp, Synthetic construct
  source 1..4101: mol_type = other DNA
gacaagaagtacagtattggattggccatcgggacgaacagcgtgggctgggccgtcatcaccgacgagtacaaggtgccatccaagaagtttaaggttctggggaataccgaccgccactcgatcaagaaaaatctcatcggggcgctgcttttcgacagcggcgagacggcggaagcgacgcggctcaagcggacggctcgtcgccgttacacccggcgtaagaaccgcatctgttacctccaggagatattcagcaacgagatggcgaaggtggacgactcctttttccaccgtcttgaggagtccttcctggtcgaggaggacaagaagcacgagcgccacccgatcttcgggaacatcgtggacgaggtggcctaccacgagaagtaccccacgatctaccacctccgcaaaaaactcgtggactcaactgacaaggccgatttgaggcttatctacctcgccctcgcccacatgattaagttccgtgggcacttcctaatcgagggtgacctcaaccccgacaactctgacgtggacaagctgttcatccagcttgtgcagacctacaatcagctctttgaggagaatccgatcaacgcatctggtgtggacgcaaaggccatcctcagcgcgcggctgagcaagtctaggcggttggagaacctgatcgcccaactgcccggcgagaagaaaaatggcctcttcggcaacctgatcgccctgtcgctggggctcacgccgaacttcaagagtaactttgacctggcggaggacgctaagctccagctatctaaggacacatacgacgacgacctggacaacctgctggcccagatcggcgaccagtacgccgacctcttcctagccgccaagaacctgtccgacgccatcctcctcagcgacatcctgcgcgtgaacacggagatcacgaaggctccgctcagcgcctccatgattaagcggtacgacgagcaccaccaagacctaactttactcaaagccctcgtgcggcagcagcttcccgagaagtacaaagagatattttttgatcagtccaagaacggttatgcgggctacatcgacggcggcgcgagccaggaggagttctacaagttcatcaagcccatcctggagaagatggacggcacggaggagctgctcgtgaagctcaaccgtgaagacctcctgcgaaagcagcgaaccttcgacaacggttcgatcccgcaccagatccacctcggggagctgcacgccatcctgaggcgacaggaggacttctaccctttcctaaaggacaaccgcgagaagattgaaaaaatcctgacgtttcgcataccctactacgtcggcccgctggcgcgcggcaactcccggttcgcctggatgacccgtaagagcgaggagacgatcaccccgtggaacttcgaggaggtcgtggacaagggcgcgagcgcgcagagcttcatcgagcgcatgaccaacttcgacaagaacctcccgaacgagaaggtgctcccaaagcactccctcctgtacgagtatttcaccgtgtacaacgagttgacaaaggtgaagtacgtgacggagggaatgcggaagcctgcgttcctctcgggcgagcagaagaaggcaatcgtggacctgctcttcaagaccaaccggaaggtgacggtgaagcagctcaaggaggactacttcaaaaaaatcgagtgcttcgactccgtggagataagcggcgtggaggaccgattcaacgcctccctcggcacctaccacgacctccttaagatcatcaaggacaaggacttcctggacaacgaggagaacgaggacatcctggaggacatcgtgctcaccctgaccctcttcgaggaccgggagatgatcgaggagcgcctcaagacgtacgcccacttgttcgacgacaaggtgatgaagcagctcaagcggcggcgatacaccgggtggggccgcctatcccgcaaacttatcaacggcatccgcgacaagcagtccggcaagacgatcctggatttcctcaagtcggacgggttcgccaaccggaacttcatgcagctcatccacgacgacagcctcacgttcaaggaggacatccagaaggcccaagtgagcggtcaaggggacagcctccacgagcacattgcgaaccttgctgggagccctgcgatcaagaaggggatattgcaaaccgtgaaggtcgtggacgagttggtgaaggtcatggggcgacacaagcccgagaacatcgtgatcgagatggccagggaaaatcagaccacgcagaagggccaaaaaaacagccgcgagcggatgaagcggatcgaggagggcatcaaggagctggggtcgcagatcctcaaggagcacccggtggagaacacgcagctccagaacgagaagctgtacctctattacctacagaacgggcgggatatgtacgtggaccaggagctagacatcaaccgcctgtccgactacgacgtggaccatatcgtcccgcagtcgttcttgaaggacgacagcatcgacaacaaggtgctcacaagatcggataagaatcgaggcaagtccgacaacgtgccctcggaggaggtggtcaagaaaatgaaaaactactggcggcagttgctgaacgccaagctcattacgcagcggaagttcgacaacctgacgaaggctgaacgtggtgggctcagcgagctagacaaggcggggttcatcaagcggcagctcgtcgagacccggcagatcaccaagcacgtggcgcagatcctggactcgcgcatgaacaccaagtacgacgagaacgacaagctcatccgtgaggtgaaggtcatcacccttaagtctaagctggtcagtgacttccgcaaggacttccagttctacaaggtccgggagatcaacaactaccaccacgcgcacgacgcctacctcaacgcggtggtggggacggcgcttattaagaaatatcccaagctggaaagcgagttcgtttacggcgactacaaggtgtacgacgtccgcaagatgatcgcaaagtcggaacaggaaatcggaaaggcgacggccaaatatttcttttactccaacatcatgaatttttttaagacggagatcaccctggcgaacggggagatccgcaagcggcccctcatcgagaccaacggggagacgggcgagatcgtctgggacaagggccgggacttcgccaccgtgcggaaggtgctttctatgcctcaagtcaatatcgtcaaaaagacagaggtgcagaccggcgggttcagcaaggagtctatcctgccgaagcgcaactcggacaagctcatcgcgcgcaagaaagactgggaccccaaaaaatatggcgggttcgactcgccgaccgtcgcctacagcgtcctcgtggtggctaaggtcgagaagggcaagagcaaaaagctaaagtcggtgaaggagctgctgggcatcaccatcatggagcgctcgtctttcgagaagaatccaatcgacttcctagaggcgaaggggtacaaggaggtcaaaaaggatcttatcatcaaactgccgaagtacagtctgttcgagctggagaacgggcggaagcggatgctggctagtgcgggcgagttgcagaagggcaacgagttggcactgccctccaagtacgtgaacttcctgtacctggcctcccactacgagaagctcaaggggagccccgaggacaacgagcagaagcagctattcgtcgagcagcacaagcactacctggacgagatcatcgagcagatcagtgagttctccaagcgggtcatcctcgcggacgccaacctggacaaggtgctgagcgcgtacaacaagcacagggacaagccaatcagggaacaggccgagaacatcatccacctgttcaccctgaccaacctgggtgcaccggctgccttcaagtactttgacacgaccatcgaccggaagcgctacacctccacgaaggaggtgctggacgccacgctgatccaccagagcatcaccgggctctacgagacacggatcgacctgagccagcttggcggggac

SEQ ID NO: 74 - DNA, 4092 bp, Synthetic construct
  source 1..4092: mol_type = other DNA
gacaaaaagtattccattggactcgctatcggcacgaacagcgtcgggtgggcggtcatcactgacgagtacaaggtgccgagcaagaagtttaaggtgctgggaaacaccgacaggcactcgatcaagaaaaatcttatcggggccctactcttcgactccggagaaaccgccgaggccacccggttgaagcgcacggcccgccgtcgctacaccaggcgcaagaaccggatctgctacctccaggagatattcagcaatgagatggcgaaggtggacgactcgttttttcacaggctagaggagtctttcctcgtggaggaggacaagaaacacgagcgccaccccatcttcggcaacatcgtggatgaggtggcatatcacgagaagtacccaaccatctaccacctccgcaaaaagctcgtggactctaccgacaaggccgacctccgtctgatctacctcgcgctggcccacatgattaagttccgaggacactttctgatcgagggcgacctgaacccagacaacagcgacgtggacaagctgttcatccaacttgtccagacctacaatcagctcttcgaggagaaccctatcaacgcctcgggcgtggacgcgaaggccatcctgtccgcccgcctgagcaagtcgcggcggctggagaacctgatcgcccagctccccggcgaaaaaaagaacggcctcttcggcaacctcatcgcgttgtcgctggggctcaccccgaacttcaagtccaacttcgacctggccgaggacgctaaactccagctctcgaaggatacctacgacgacgacctcgacaacctgctggcccagatcggcgaccagtacgcggaccttttcctggcggccaagaacctgagcgacgcgatcctccttagcgacatactccgtgtgaacaccgagatcacgaaggccccgctctccgcgtccatgattaagcgctacgacgagcaccaccaagaccttaccctgcttaaggcgctggtcaggcagcagttaccggagaagtacaaggagatcttttttgatcaatctaagaacggttacgccgggtacatcgacggcggcgcgtcccaggaggagttctacaagttcatcaagccgatcttggagaaaatggacgggaccgaggagctgctcgtgaagctcaaccgcgaagacctcctccgcaagcagcgcaccttcgacaacgggagcatcccgcaccagatccacctgggagagctgcacgcgatcctgcggagacaagaggacttctaccccttcctcaaggacaaccgggagaagattgaaaaaatacttacttttcgtatcccgtactacgtcgggccccttgcgaggggcaactccagattcgcgtggatgacccgcaagtccgaggagaccatcaccccgtggaacttcgaggaggtggtggacaagggcgcgtcggcccagtcgttcatcgagcgcatgaccaacttcgacaagaaccttccgaacgagaaggtgctcccgaagcacagcctgctctacgaatattttactgtgtacaacgagctgacgaaggtcaagtacgttacggaggggatgaggaagcccgccttcctctccggcgagcagaagaaagccattgtggatctcctgttcaagaccaaccgcaaggtgacggtgaaacagctcaaagaggactacttcaagaagatcgagtgcttcgactccgtagagatcagcggggtcgaggaccgcttcaacgcctcgctgggcacgtaccacgacctgctaaagattatcaaggacaaagacttcctagacaatgaggagaacgaggacattctggaggacatcgtgctgactctgacgctgttcgaagaccgcgagatgatcgaggagcggcttaagacgtacgcccacctgttcgacgacaaggtgatgaagcagttgaaacggcggcgctacaccgggtggggccgcctctcccgcaagctcatcaacggcatccgcgacaagcagtcggggaagacgatcctggacttcctcaagagcgacggcttcgccaaccgaaacttcatgcagctaatccacgacgacagcctgacgttcaaggaggacatccagaaggcccaagtgagcggccagggagactcgctacacgagcatatcgccaacctggctggcagcccggcgattaagaaaggaatcctccaaaccgtcaaagtggtggacgagctggtgaaggtgatgggccgccacaagcccgagaacattgtgatcgagatggcgcgggagaaccagacgacgcagaagggccaaaaaaatagcagggaaaggatgaagcgaatagaggaggggatcaaggagctggggagccagattctcaaagagcacccggtcgagaacacacagctccagaacgagaagctgtacctctactacctccaaaacggccgcgatatgtacgtggaccaggaactagacatcaaccggctgagcgactatgacgtggaccacatcgtgccgcagtccttcctcaaggacgactcgattgacaacaaagtgctcactagatccgacaagaacagaggcaagagcgataacgtcccgtcggaggaggtcgtcaagaaaatgaaaaactactggcggcagctcctaaacgccaagctcatcacgcagcgtaagttcgacaacctgacgaaggcggagcggggcgggctgagcgagctggacaaagcggggttcatcaagcggcagctcgttgagacgcggcagatcacaaagcacgtcgcgcaaatcctcgactcccgcatgaacaccaagtacgacgagaacgacaagctcatccgggaggtgaaggtcattacccttaaatcgaagctcgtcagcgactttcgtaaggacttccagttctacaaggtcagagagatcaacaactaccaccacgcccacgacgcctatctgaacgccgtggtgggcaccgcgcttattaagaagtaccccaagctggagtccgagttcgtgtacggcgactacaaggtttatgacgtcaggaagatgatcgccaagtcggaacaggagatcggaaaagctaccgccaaatatttcttctatagcaacatcatgaacttcttcaaaaccgagatcaccctcgccaacggcgagatccggaagcgcccgctcatcgagaccaacggggagaccggggagatcgtctgggacaaggggcgggacttcgctactgtccgaaaggtgctctccatgccacaagtgaatatcgtcaagaaaacagaggtgcagaccggagggttcagtaaggagtccatcctgcccaagcggaactccgacaagctaattgctcgcaaaaaggattgggatcctaaaaaatatggcggcttcgactcgcccacggtcgcctactctgtgctggtcgtggcgaaggtggagaagggcaagtccaagaagctcaagagcgtcaaggagctgctggggatcacgatcatggagcgtagttcgtttgagaagaatcccatcgacttcctggaggctaagggctacaaggaggtcaaaaaggacctcatcattaagctgccgaagtacagcctcttcgagctggagaacgggcggaagcgtatgctcgcctccgctggggagttacaaaaggggaacgagctggcgctgccgtctaagtacgtcaacttcctgtacctggcctcccactacgagaagctcaaggggtcgccggaggacaacgagcagaagcagctcttcgtagagcagcacaagcactacctggacgagatcatcgagcagatttcagagttctcaaagcgggtcatcctcgccgacgccaacctggacaaggtgctctcggcctacaacaagcaccgggacaagccgatccgcgaacaggccgaaaacatcatccacctgttcacgctcaccaacctcggtgccccggcggccttcaagtactttgacacgaccatcgaccggaagcgctatacctcgacgaaggaggtgctggacgccaccctgatccaccagtccatcaccgggctttacgagacccggatcgacctctcgcagcta

SEQ ID NO: 75 - DNA, 4101 bp, Synthetic construct
  source 1..4101: mol_type = other DNA
gacaagaagtatagtattggactcgccatcggaaccaactctgtggggtgggctgttattacagatgaatataaggtgccatccaaaaagtttaaagttctgggcaatactgatagacactcaatcaagaagaatctgataggtgcacttctgtttgatagtggagagactgccgaggcaaccagacttaaaaggactgcaagaagaagatataccagaagaaagaataggatttgctatttgcaggaaatcttcagcaacgaaatggccaaggttgatgactcatttttccataggttggaggagagttttcttgtggaggaagataagaagcacgaaagacacccaattttcgggaatatagtggacgaggtggcttatcatgagaagtatcccactatctaccacctgagaaagaaacttgtggactcaaccgataaggctgatcttaggcttatatacttggcccttgcacatatgatcaaattcaggggccattttcttatcgaaggcgatcttaatcccgataactcagatgtggacaagctgtttatacaacttgtgcaaacctacaatcaactcttcgaggagaatcccattaacgcctccggcgtggatgcaaaagccatactgtcagccagactgagcaaaagtaggagactggagaatcttatagcccaactgcccggtgaaaagaagaatgggctcttcggaaatctgatcgctctttcattggggttgacacccaactttaagagtaactttgacttggcagaagatgcaaagttgcagctcagtaaagacacatatgacgatgaccttgacaatctcttggcacaaataggggatcaatacgctgaccttttcctcgctgccaagaacctcagcgacgctatactgttgtccgacattcttagggttaataccgaaattacaaaggcccctcttagtgcaagtatgatcaaaaggtatgatgagcatcaccaagaccttacactgctgaaggctctggttagacagcaactccctgaaaagtataaggaaatattcttcgaccaaagtaagaacgggtacgccggttatattgatgggggcgcaagtcaagaagaattttacaaattcatcaagccaattcttgaaaagatggacgggactgaggaattgctggtgaaactgaatagagaggaccttcttagaaaacagaggacatttgacaatgggtccatcccacaccagattcatctgggggaactccacgcaatattgaggagacaagaagacttttacccattccttaaggataatagagagaaaatcgaaaaaatcctgactttcaggattccttactatgttgggccactggccagggggaactcaagattcgcttggatgacaaggaagtcagaagaaaccataaccccttggaattttgaagaggtggttgataagggggcatcagcccagtctttcatagagaggatgaccaactttgataaaaatcttccaaatgagaaggttttgccaaaacatagtcttttgtacgagtactttactgtttataacgaattgaccaaggtgaagtatgtgaccgagggaatgaggaagccagcatttttgtccggggagcaaaagaaagcaatcgttgatcttctcttcaagaccaacagaaaagtgaccgtgaaacaactgaaggaagactacttcaaaaagatagaatgtttcgattcagtggaaattagcggtgttgaagacaggttcaatgcttcattgggtacttaccacgacctgttgaagataatcaaagacaaggactttctcgataatgaggagaacgaagacatcttggaagacattgtgcttacactcactttgtttgaggacagggaaatgattgaggaaagactcaaaacttacgctcatttgtttgatgataaggttatgaaacaactaaaaagaagaaggtacaccggctggggaagattgagtaggaaactgatcaacggtattagagataaacaatccggaaagactatcctcgatttccttaagagtgatggctttgcaaataggaattttatgcagctgattcatgacgactcacttaccttcaaagaagacatccaaaaagctcaggtgtctgggcaaggcgacagtctgcatgaacatatagctaacttggctgggagtcccgccatcaagaaggggatacttcaaacagttaaagttgtggacgaattggtgaaggtaatgggaaggcacaagcctgaaaatatagtgatagaaatggcaagggaaaatcaaacaacccagaagggacagaagaacagtagggaaaggatgaaaaggatagaagaggggatcaaagagcttggtagccagatcctcaaggaacatccagtggagaatacccaacttcaaaacgagaaactctatttgtactacttgcagaacggaagagatatgtatgtggaccaagagcttgatattaacaggctgagcgattatgacgttgaccacatagtgccccaatcattcctcaaggatgactctattgataataaggtgctgacaaggagtgacaagaatagagggaaatccgacaacgttccatccgaggaagttgtgaagaagatgaagaactactggaggcagttgctgaacgctaagctcattacccagaggaaattcgataacctgaccaaagcagagagaggcgggctgagcgaactcgataaagcaggtttcatcaagagacaactcgtggagactaggcaaattactaagcacgtggctcaaatactcgacagcaggatgaacacaaagtacgacgagaacgacaagctcattagagaggttaaggttattactctgaaaagtaaattggttagcgatttcagaaaggatttccaattctataaggttagagagatcaacaattatcatcatgcacatgatgcctatctgaatgctgtggttggtacagcccttatcaagaagtaccctaagctagagagcgagtttgtgtacggagattataaggtgtatgatgtgaggaaaatgatcgctaaaagtgagcaagagattggaaaggctaccgccaaatacttcttttattccaatattatgaatttcttcaagacagaaatcaccctggctaacggcgagataaggaagaggccgcttatcgaaactaatggggagacaggcgaaatagtgtgggacaaagggagggatttcgcaactgtgaggaaggttttgagcatgcctcaggtgaatatcgttaagaaaaccgaagttcaaactggagggttctctaaggaaagcattctccccaagaggaactccgacaagctgattgctagaaagaaagactgggaccccaagaagtatggcggattcgactcacccactgtggcatatagcgttctcgtggtggcaaaggttgaaaagggtaaatccaaaaaactcaaatccgtgaaggaactccttggcataactattatggaaaggagtagctttgaaaagaatcccatcgactttctcgaagctaagggctataaggaagttaagaaggaccttataatcaaacttccaaaatactccctttttgagttggaaaacggcagaaagagaatgttggccagtgccggggagcttcaaaagggcaacgaactggctctgcctagcaaatatgtgaactttttgtatctggcatcacactacgagaaacttaaaggctctcctgaggacaacgagcaaaaacagctctttgttgaacagcataagcactacctcgacgagattattgagcagatcagcgagttctcaaagagagttattctggctgacgctaatcttgacaaggttttgtccgcttacaacaaacacagggataagccaatcagggagcaggcagaaaacataatccatctctttaccctgacaaacctcggtgcccccgctgctttcaagtattttgatactaccattgacaggaagagatatacttccactaaggaagtgctcgacgcaaccctcatacaccaaagtatcacaggcctctatgaaactaggatagatttgtctcaacttgggggcgat

SEQ ID NO: 76 - DNA, 4101 bp, Synthetic construct
  source 1..4101: mol_type = other DNA
gacaaaaagtattccatcgggcttgctatcggaaccaactctgtggggtgggcagttattaccgacgaatacaaggtgcccagcaagaagtttaaggttctggggaacacagatagacatagcataaagaaaaacctgataggcgcactgttgttcgactccggggaaacagccgaagctaccaggctgaagagaactgcaagaagaaggtacaccagaagaaaaaacagaatatgttatctccaagagattttctctaacgagatggccaaggtggacgactcattctttcacagactggaagaatctttccttgtggaagaagataagaaacacgagaggcaccctatttttggcaatatcgtggatgaggtggcttaccacgaaaaataccctacaatataccacctcaggaaaaaattggttgatagtacagacaaggccgacctcaggctcatctatttggccctggcccatatgattaaattcagggggcactttctcatcgagggagatttgaaccccgacaacagtgatgttgataagctctttattcagctcgtgcagacttacaatcagttgtttgaggaaaaccccattaatgcttccggggtggacgccaaggcaatcctttctgcaagactctcaaagtcaaggagactcgaaaatctgatagcacagcttccaggagagaagaagaacgggctctttggaaacctgatcgctctgtcactcggactcacacccaatttcaaaagcaattttgatttggcagaggacgctaagctgcaactcagtaaggatacctacgacgatgacttggataatctgctcgcacaaattggggaccagtatgcagacctgtttctcgcagctaagaacttgagtgacgccatattgctcagtgacatcctcagggttaataccgagattacaaaagctccactctctgcaagcatgatcaagaggtatgacgagcaccatcaagacctgacactccttaaggcgttggttaggcagcaacttcctgaaaagtataaggaaatcttcttcgatcaaagcaaaaacggctacgccggctatatagacgggggagcatcccaagaagaattttataagttcataaaacctatattggagaagatggacgggacagaggaattgctcgtgaaactgaacagggaggatctcctcaggaagcaaaggaccttcgacaatggctccatcccacatcagattcacctcggcgaactgcacgcaatactgagaagacaagaggacttttatcctttcctgaaggacaacagggagaaaatcgagaaaatcttgacattcagaatcccatactacgttgggcctctggccagaggtaacagtaggttcgcctggatgactaggaaatcagaggagactattacaccctggaactttgaagaagttgttgataagggagcttcagcacaatcattcatcgaaagaatgacaaactttgacaaaaatctgcctaatgagaaagtgctcccaaaacattccctgctgtatgagtattttaccgtttataacgagcttaccaaggtgaaatacgttactgaaggtatgagaaagccagcttttctttcaggggagcaaaagaaggctatcgtggatcttctctttaagaccaacagaaaggttaccgtgaagcagcttaaggaagactactttaaaaagatcgagtgttttgactcagtggaaataagcggtgttgaagatagattcaacgcatccttgggaacttatcatgatcttcttaagataatcaaggataaagactttctcgacaacgaggaaaacgaagatatactggaggacatagttctgacacttactttgttcgaggatagggagatgatcgaggaaagactgaaaacatatgctcaccttttcgacgacaaagttatgaaacaactcaagagaaggagatatacagggtgggggagattgagcaggaaactgattaatggtatcagagacaaacagtcaggaaaaacaatactcgactttttgaaatcagacgggttcgcaaataggaatttcatgcagcttatacacgacgattcacttacttttaaagaggacattcaaaaggctcaagttagtggacaaggtgactccctccacgaacacatcgcaaatctcgctggcagccctgcaattaagaagggtatactccagacagttaaggttgttgacgagctggttaaagtgatgggaagacacaaacccgagaacatagtgatagagatggccagggaaaaccaaaccactcaaaaagggcagaaaaattccagagagaggatgaaaaggattgaagaaggtatcaaggagctgggtagccaaattctgaaagaacatcctgtggaaaacactcaactccagaatgagaaactctatctgtactatctgcaaaatgggagagatatgtatgtggaccaggaactggacataaacaggctctcagattacgatgtggatcatatcgtgccacagtcctttcttaaggatgatagcatcgacaataaggtgcttaccaggtccgacaagaacaggggaaagtcagataacgtgccttctgaagaagttgttaaaaagatgaagaactactggagacagctgcttaacgctaagctcataacacagaggaagtttgacaacttgaccaaggccgagagaggcggactctcagaattggataaggcagggttcataaaaaggcagctggtggaaacaaggcagataactaaacatgtggctcagatcctcgatagtaggatgaatacaaaatacgatgagaacgacaagctcataagggaggttaaagtgataactctgaaatccaaactggttagcgattttaggaaggatttccagttttacaaagttagggagatcaacaattatcatcacgcccacgatgcctacttgaacgcagttgtgggtactgcacttatcaaaaagtaccctaagctggaatccgagtttgtttatggagactataaggtgtacgacgttagaaaaatgattgcaaagtcagagcaggagatagggaaagccactgcaaaatatttcttttatagcaatatcatgaatttctttaagacagaaatcacactggccaatggggaaataaggaagaggcccctgatcgaaactaatggcgagacaggggagattgtgtgggataaaggtagggactttgcaacagtgaggaaagtgctgagcatgccccaagttaatatcgttaaaaagaccgaggttcaaacagggggctttagtaaggaaagcattttgcccaagaggaatagtgacaaattgattgctaggaaaaaagattgggaccccaaaaagtatggcggatttgatagccccactgttgcttactccgtgctcgtggttgcaaaggtggagaagggaaagagcaagaaactgaagtcagttaaggaactccttggtatcactatcatggaaagaagctcctttgagaagaaccctattgacttcctggaggctaaagggtacaaagaggttaagaaagaccttatcattaaattgcccaaatatagtcttttcgagcttgaaaacggaagaaagaggatgcttgcatccgctggcgaattgcaaaagggcaatgagcttgctctcccttccaagtatgtgaacttcctttatcttgcctcacactatgaaaaactcaaaggttcacccgaagacaacgaacaaaagcaactatttgtggaacaacacaagcactacctggacgaaatcattgagcaaatttctgagttttcaaaaagggtaatcttggctgacgcaaatctcgacaaagttttgtcagcttacaacaaacatagagataagccaattagagagcaagctgagaatatcatccatctgtttaccctgactaaccttggagcgcctgctgcttttaaatatttcgacaccacaatcgacaggaagaggtacactagcactaaggaagttctcgacgccaccctcatccaccagagtattacaggcctgtacgagacaagaattgatctttctcaacttggtggtgac

SEQ ID NO: 77 - DNA, 4101 bp, Synthetic construct
  source 1..4101: mol_type = other DNA
gataagaagtactcaatcggtctggcaatcggaaccaactctgtgggttgggcagtgattacagatgagtataaggtgccaagcaaaaaattcaaggtgctgggtaataccgacagacacagcattaagaagaatttgattggagcactcctctttgactcaggggaaacagcagaggcaacaaggctgaagaggacagcaaggcggaggtacacaaggcggaaaaacaggatatgctacctccaggaaatctttagcaacgagatggctaaagtggatgatagctttttccatagactcgaagaatcctttcttgttgaagaggacaaaaagcatgaaaggcatcccatcttcggcaatatagttgatgaggttgcataccatgagaagtaccccacaatctaccacctcagaaagaaacttgtggactccacagataaagcagacctgaggctcatatacctcgcactcgcacacatgatcaagttcagagggcactttctcatcgaaggtgacctgaatccagataattcagatgtggataaactgtttatacagctggtgcaaacatacaaccaacttttcgaggaaaacccaatcaatgcctccggtgttgatgcaaaggccatcctgtcagcaagactcagcaaaagcaggcggctcgaaaacctcatcgcccagcttcccggtgaaaagaagaacgggctctttggtaatctcatcgcattgagccttggtcttactccaaacttcaagagcaattttgatctggcagaggatgctaaactgcaactctcaaaggacacatatgacgatgaccttgacaatctgttggcccagatcggggaccaatatgcagacctcttcctggccgcaaagaatctgtcagatgcaatcctcttgtccgacatactgagagttaacactgagatcacaaaggcacctctgtccgcctccatgattaagagatacgatgagcatcaccaggatctgactttgctcaaagccctcgttagacagcagttgccagaaaagtacaaagaaatattctttgatcaatcaaaaaacggatatgcagggtacatcgacggtggggcaagccaggaagagttctacaaattcatcaaacctatcctggaaaagatggatgggacagaagagctgctggttaagctgaatagggaagacctcctcagaaagcagaggacatttgataacgggagcatccctcatcaaatccacctcggtgaactccatgctatcctgagaaggcaggaagacttttatccatttttgaaggacaatagggagaaaatcgaaaaaatcctgacattcagaatcccatactacgttggtcctctggcaagaggtaacagtaggttcgcatggatgacaaggaaaagcgaggagacaatcacaccctggaattttgaggaagttgttgacaagggtgccagcgcacaatcctttatcgaaagaatgacaaatttcgacaagaatctgcctaacgaaaaggttctcccaaagcattcactcctgtacgaatattttacagtttataacgaactgactaaagttaaatacgttaccgagggtatgaggaagccagcattcctttccggggaacagaagaaagctattgtggacctcctgttcaagacaaatagaaaagtgacagttaagcaactcaaagaggattacttcaaaaagatcgaatgttttgactctgtggagatcagcggggtggaggatagattcaacgccagcctgggtacatatcatgatctcctgaaaatcattaaagacaaggacttccttgacaacgaggagaacgaggacattctggaagacattgttctgaccctcacactctttgaggatagggagatgattgaggaaagactgaagacctacgcccacctctttgacgataaagtgatgaaacagctcaagagaagaaggtatacaggttgggggagactgagcaggaagttgatcaatgggattagggacaaacagtccgggaaaacaatcctcgattttctgaagtcagacggtttcgcaaacagaaattttatgcagctcattcacgatgacagcttgacattcaaggaagacatccaaaaggctcaagtgagcggccaaggggatagcctccacgagcatattgcaaatctggcaggttcaccagccatcaaaaagggcatacttcagacagttaaggttgtggacgaattggttaaagttatgggcaggcataagccagagaatatcgttatcgaaatggcaagggagaaccaaacaactcaaaaagggcagaaaaatagcagagagaggatgaaaagaatcgaggaagggatcaaggaacttgggtcccaaatcctcaaggagcacccagttgaaaatactcaactgcaaaacgagaagctctatctctactatctccaaaacgggagggatatgtatgttgaccaggagctggatattaacagactgtcagattatgatgttgatcatatcgtgccccagtcattcctgaaggacgattccatcgacaacaaagttctcacaaggtccgataaaaacaggggcaagtccgataacgttccaagcgaagaagtggtgaaaaagatgaaaaactattggagacaacttctgaatgcaaagttgattactcagagaaagtttgacaacctcacaaaagcagaaagaggcgggcttagcgaactcgataaggcagggtttatcaaaagacagctggttgagacaaggcagatcacaaaacatgtggcacagatccttgactcaaggatgaataccaagtatgatgagaatgataagttgatcagggaggttaaagttatcacactcaaatccaaactggtgtcagacttcaggaaagactttcaattttataaggtgagggagatcaataactaccaccatgcacatgacgcctacctgaacgcagtggtgggtacagcattgattaaaaaataccctaagctggagtctgagtttgtgtacggggactacaaggtgtacgacgtgaggaaaatgatagccaagtccgagcaggagatcgggaaagcaacagctaagtatttcttttacagtaatatcatgaatttctttaaaactgagattactctggcaaacggggagatcaggaaaagacccctcatcgagactaatggtgaaacaggtgagatcgtttgggacaaggggagggattttgctactgttagaaaagttctgagtatgccacaagtgaatattgtgaaaaagacagaagttcagacaggtgggttctccaaagaatccatcctgcccaagagaaattcagacaagctcatcgcaagaaagaaggactgggaccctaagaagtacggaggatttgacagccccaccgtggcctattccgtgcttgttgtggcaaaggtggagaaagggaagagcaaaaaactgaaatccgtgaaagaactgctgggaattaccatcatggaaagaagctcctttgagaagaacccaatcgacttcctggaagcaaaaggatataaggaagtgaaaaaggacctcattatcaagctcccaaaatactcacttttcgagttggagaacggtagaaagaggatgctggcaagcgcaggggaacttcagaaaggcaatgagctggcattgccatcaaagtatgtgaacttcctctacttggccagccattacgagaaacttaaaggtagcccagaagataacgagcaaaaacagctctttgtggaacagcataagcattatctggatgagatcatagaacaaatctcagagttttccaagagagttatcctcgcagatgcaaacctggataaggttctctcagcctataataagcatagagacaagccaattagagagcaagcagagaacattatccacttgttcactcttacaaacctgggggcaccagccgccttcaaatatttcgatacaacaatagacagaaagaggtataccagcaccaaagaagttctcgacgccacactgatccatcaatcaatcacaggcctttacgaaactaggatcgacttgtcacaactgggtggggat

SEQ ID NO: 78 - DNA, 3307 bp, Synthetic construct
  source 1..3307: mol_type = other DNA
gagcaaggacacctacgacgacgacttggacaacctattggcccagataggtgaccagtatgcagacctcttccttgcggccaagaacttgagtgacgctatactgctcagtgacatcctgagggtgaacactgagatcactaaggcccctctctctgcctcaatgattaagcgttacgacgagcatcaccaggatctcaccctgcttaaggcccttgttcggcagcagctccctgagaagtacaaggagatattttttgaccagtctaagaacggctacgccggttacattgacggtggggcaagccaggaggagttctacaagttcatcaagccgatccttgagaagatggacggcaccgaggagctacttgtcaagttgaaccgggaagacctgctccggaaacagcgtacattcgacaacggcagcatccctcaccagatccacctgggcgaactacacgccatcctccgacgtcaggaggacttctatccattcttgaaagataacagggaaaaaatcgaaaaaatacttacgtttcgaataccttactacgtggggccccttgctcggggaaactccagattcgcatggatgaccaggaagtcagaggagaccatcacaccctggaactttgaggaggtggttgacaaaggtgcttctgcccagtccttcattgagcggatgactaacttcgacaagaacctgcccaacgagaaggtgctgccaaagcacagcctgctctacgaatactttactgtgtacaatgagctgacgaaggtgaagtacgtgacagaggggatgcggaagcccgctttcctgagcggcgagcaaaaaaaagcaatcgtggacctactgttcaagaccaaccgaaaggtgacagtgaagcagctcaaggaggactacttcaaaaaaatcgagtgcttcgactctgttgagataagcggcgtggaggaccgattcaacgcctcattgggaacctatcacgacctgctcaagatcattaaggacaaggacttcctggataatgaggagaatgaggacatcctggaggatattgtgctgacccttactctattcgaggacagggagatgatcgaggagcgactcaagacctacgctcacctgttcgacgacaaggttatgaagcaattgaagcgtaggcgatacacggggtggggaagactctcccgaaaactgataaacggcatcagggacaagcagtcagggaagacgatcttggacttcctgaaatccgacgggttcgccaaccgcaacttcatgcagctcattcacgacgactcactaacgttcaaagaggacattcagaaggctcaagtcagtggacaaggcgactccctgcacgagcacattgcaaaccttgcgggctccccggcgattaaaaagggcattctccaaacggttaaggtggtggacgagctggtgaaggtgatgggccgacacaagcctgagaacatcgtgatcgagatggccagggagaaccagactacccagaagggtcagaagaactctcgggaacgtatgaagcgtattgaggaggggattaaggagttgggctctcaaatcctcaaggagcaccctgtggagaacactcagctccaaaacgagaagctgtacctgtactacctgcaaaacgggcgcgatatgtacgtggatcaggagttggacatcaacaggcttagcgattacgacgtggaccacatcgtgccacagtcattcttaaaggacgacagcatcgacaacaaggttctgacgaggagcgacaagaatcgagggaaaagtgacaatgttccatccgaggaggtggtcaagaaaatgaagaactattggcgtcagcttctgaacgccaagctcatcacccagcggaaattcgacaacctgactaaggctgagcgaggcggactctccgagcttgacaaggctggcttcatcaagcggcagttggtcgaaacccgacagataacgaagcacgttgcccagatacttgactcccgtatgaacaccaagtacgacgagaacgacaagctcatcagggaggtgaaggtcattacccttaagtccaaactcgtcagcgactttcgtaaggacttccagttctacaaggtgcgcgagatcaataactaccaccacgcacacgacgcctacctgaacgcagtggttggaaccgcgttgattaaaaagtaccccaagttggagtcggagttcgtttacggggactacaaggtgtacgacgttcggaagatgatcgccaagtctgaacaggagatcgggaaagcaaccgccaagtatttcttctatagcaacatcatgaacttctttaaaaccgagatcacacttgccaatggcgagatccgtaagaggccgctgatcgagacaaatggggagactggcgagatcgtgtgggacaagggccgcgacttcgcaaccgttcggaaagtcttgtccatgcctcaagtcaacatcgtcaagaagactgaggtgcaaacaggcgggttctcgaaggagtccatactgcccaagaggaactcagacaagctcatagcacgcaaaaaagactgggatccaaagaaatacggcgggttcgactcgccgacagtcgcatactccgtgttagtggtggctaaagtggaaaaggggaagtccaagaagctcaagtccgtcaaggagttgctcgggatcaccattatggaacggtcctcattcgagaagaatcccattgacttcctagaggcgaagggctacaaagaggtcaaaaaggacctaattattaagctccccaagtattcactcttcgaacttgaaaatggtcgtaagcggatgttggcaagcgctggagagcttcagaaggggaacgagcttgcactgccttccaagtacgtgaacttcctgtacctcgcctctcattacgagaagttgaagggctcaccggaggacaacgagcagaagcagttgttcgtggagcagcacaagcactacctcgacgagatcattgagcagataagtgagttcagcaaacgggtgatccttgccgacgctaacctggacaaggtgctgagcgcctacaacaagcacagagacaagccgatccgagagcaagcggagaacatcatacacctgttcaccctcacgaacctcggggctcccgcagccttcaaatattttgacacgaccatcgaccgtaaacgctacactagcacgaaggaggtgctggacgctacccttatccaccagtccatcaccggcctgtacgagacgagaatcgacttgtcgcagctcggtggtgac

SEQ ID NO: 79 - DNA, 4101 bp, Synthetic construct
  source 1..4101: mol_type = other DNA
gacaaaaaatactcaattggtctggcaattgggaccaacagtgtcggatgggccgtgattaccgacgagtacaaggtgccgtccaaaaaattcaaggtgcttgggaacaccgaccgccactcgatcaagaaaaacctaatcggtgcgttgcttttcgacagtggggagaccgccgaggcaacacgcttaaaacgcacagctaggaggagatatacacggcgcaagaaccgaatatgctacttacaggagatattctccaatgagatggcgaaggtggacgactctttcttccatcggcttgaggaatccttcctggtcgaggaggacaagaagcacgagcgacacccgatattcgggaacatcgttgatgaggtggcgtaccacgagaagtacccaacgatataccacttacgcaagaagctcgtggactctacggacaaggccgacttgcgccttatctacttggcactggcccacatgattaagttccgaggccacttccttatcgagggtgacctgaaccccgataactccgacgtggacaagctcttcatccaactcgtccagacatacaaccagctattcgaggagaatcctatcaacgcctctggggtggacgctaaagctatcctctcagcccgcctgtcaaagtcgaggaggttggagaacctaatcgcccagcttccaggcgagaagaaaaatgggctgttcggaaaccttatcgcactctcactgggcctaaccccgaacttcaagtccaacttcgacctggcagaggacgcgaaattgcagttgtcgaaagacacctatgacgatgacctggacaacctgttggcccagataggggaccagtacgccgacctgttcctagcggccaagaacctgtccgacgccatcttgctgtcggatatactgcgggtgaacaccgagatcactaaagcacctctctccgccagcatgattaagcgttacgacgagcaccaccaagatttgaccctgctaaaggcacttgtacggcagcagcttcccgagaagtacaaggagatctttttcgaccaaagcaagaacggctacgccgggtacatcgacggaggtgccagccaggaggagttctacaagttcattaagcccatcctggagaagatggacgggactgaggaactacttgtgaagctgaaccgggaagacttactacggaagcagcgtaccttcgacaacggttctatcccacatcagatccatcttggggagttgcacgcgatcctgcgacgccaggaggacttttaccccttcctgaaagacaaccgcgagaaaatcgagaagatactgaccttcagaataccttactacgtcggaccccttgcgcgaggcaactcaagattcgcgtggatgaccaggaaatcagaggagaccatcacaccctggaatttcgaggaggtggttgacaagggtgcctccgcccagtcctttatcgaacgaatgaccaacttcgacaagaacttgcccaacgagaaggtgctccccaaacacagcctcctctacgaatatttcacagtgtacaacgagcttactaaagttaagtatgttactgagggcatgaggaaacccgccttcctgtcaggcgagcagaagaaagctattgtggacctccttttcaagaccaaccggaaggtgacagtgaagcagctcaaggaggactacttcaagaagatagagtgcttcgacagcgtggagatcagcggggtggaggacagattcaatgcctctctcggaacataccacgacttgcttaagatcatcaaggacaaggacttcctcgacaacgaggaaaacgaggatattctggaggatattgttctgactcttaccctgttcgaggaccgggagatgatcgaggagcgtctcaagacctacgcccacctgttcgacgacaaagttatgaagcagctcaagcgtcggagatataccggatggggccgtctgtctcggaagctcatcaacgggatcagggacaagcagtcagggaagacgatcttagacttccttaagtctgacggcttcgccaacaggaacttcatgcagttgatccacgacgacagccttaccttcaaggaggacatccagaaggcccaagtgagtggccagggtgacagcctccacgagcatattgctaatcttgcgggttccccagcgattaaaaagggcatacttcaaaccgttaaggtggtggacgagcttgtcaaggtgatggggcgacacaagcccgagaacatcgtgatcgagatggccagggagaaccagaccacccagaaggggcagaagaatagccgagaacgcatgaagcgcatcgaggaggggattaaggagctagggagccagatcctcaaggaacatcccgtcgagaacacccagctccagaacgagaagctatacctctactacttgcaaaacgggagggatatgtacgtggatcaggagttggacattaaccgcctaagcgactacgacgtagatcacatcgtgcctcagtcattcctcaaagacgacagcattgacaacaaagtcttgacccgatccgacaagaaccgaggaaaatccgacaatgtgccctcagaggaggtcgtcaagaaaatgaagaactattggaggcagctacttaacgccaaactcataacccagcggaagttcgacaacctgacaaaggctgagcggggtgggctcagcgagcttgacaaggctggcttcatcaagcggcagttggtggagacaagacagataacgaagcacgtggctcagatcctggactctcgcatgaacacgaagtacgacgagaacgacaaattgatccgcgaggtcaaggttattacgctcaagagcaaacttgtcagcgatttccgcaaggacttccagttctacaaggtgagggagattaacaactaccaccatgcacatgatgcctacttgaacgcagtggtggggaccgcgcttattaaaaagtaccctaagttggagtcagagttcgtttatggggactacaaggtgtacgacgtccggaagatgattgcaaagtctgaacaggaaatcgggaaggccaccgccaaatatttcttctacagtaacattatgaatttttttaagactgaaattactctcgcaaacggcgagatcaggaagcgtcccctcatcgagacaaacggggagaccggggagatagtctgggacaaggggcgggacttcgctacggtgaggaaggtgctctcgatgccacaagtgaacatcgtcaaaaagacagaggtgcagaccggtggcttctcaaaggagtcaatcctgccaaaacgtaacagcgacaagctcatcgcccgcaagaaagactgggaccctaagaagtatggtgggttcgactcaccgacggtcgcatactccgttctggtcgtggcaaaggtggaaaagggcaagtccaaaaaactgaaatccgtgaaggagttgcttggcattaccatcatggaacgcagcagcttcgagaagaaccccattgacttcctggaggctaaagggtacaaggaggtcaagaaagatttaattattaagctacctaagtacagcttgttcgagctggagaacggccgaaaacgaatgctcgcatccgccggggaacttcaaaagggcaacgagcttgcgctgccctccaagtacgtgaacttcctgtacttggcatcccactacgagaaactcaagggtagcccagaggacaacgagcagaagcagctattcgtggagcagcacaagcactacctcgacgagataatcgagcagatcagtgagttcagtaagcgggtgatactcgcggacgccaacttggacaaggtgcttagtgcctacaacaagcaccgtgacaagcccatccgagaacaggctgagaacatcatccaccttttcactctgacaaacctcggtgctcccgccgccttcaaatacttcgacactaccatcgacaggaagcgctacacatctacgaaggaagttcttgacgctacgcttattcatcagtctatcacagggctgtacgagacaaggatcgaccttagccaactcggcggggat

SEQ ID NO: 80 - DNA, 4101 bp, Synthetic construct
  source 1..4101: mol_type = other DNA
gacaagaagtacagcatcgggctggcgatcgggaccaactccgtcggctgggctgtgattaccgacgagtacaaggtgccatccaagaagttcaaggtcctcggcaacactgaccggcacagcattaagaagaacctgattggggcgctgctgttcgattcgggggagactgcggaggcgaccaggctgaagcggactgcgcgccggaggtacaccaggaggaagaatcggatctgctacctccaggagattttctcgaatgagatggccaaggtggacgattccttcttccatcgcctggaggagtcgttcctcgttgaggaggacaagaagcatgagaggcatcccattttcgggaatatcgttgacgaggtggcttaccatgagaagtacccgaccatctaccatctgcggaagaagctcgtcgattcgaccgataaggccgacctgcggctgatctacctggccctcgcgcacatgattaagttccggggccatttcctcatcgagggcgacctcaacccggacaactcggacgtggataagctcttcattcagctcgtgcagacatacaaccagctcttcgaggagaatcccattaacgcctcgggggtcgacgctaaggctattctctcggctcggctgtcgaagtcgcgccggctggagaatctcattgcccagctcccaggcgagaagaagaacggcctcttcggcaacctgattgccctgtcgctggggctcacaccgaatttcaagtcgaacttcgacctcgccgaggacgctaagctccagctcagcaaggatacttacgatgatgacctcgataacctgctcgcccagattggggatcagtacgcggatctgttcctcgcggccaagaatctcagcgatgctattctcctgtcggacattctccgcgtcaacacagagattactaaggccccactgtcggcgagcatgattaagaggtacgatgagcatcatcaggacctgacactgctcaaggcgctggtccggcagcagctccccgagaagtacaaggagattttcttcgatcagtcaaagaatgggtacgcgggctacattgatggcggcgcgtcccaggaggagttctacaagttcattaagcccatcctggagaagatggacgggaccgaggagctgctggtgaagctcaatcgggaggacctgctccggaagcagcgcacattcgacaatggctcgattcctcaccagattcacctgggcgagctgcacgccattctccgcaggcaggaggacttctacccgttcctcaaggacaaccgcgagaagatcgagaagatcctgaccttccggattccatactacgtggggccgctcgcgcgggggaactcccggttcgcgtggatgactcgcaagtccgaagaaacgattacaccgtggaatttcgaggaggtcgtcgacaagggcgctagtgcgcagtcattcattgagaggatgaccaatttcgataagaacctgcctaacgagaaggtgctgccgaagcattcgctgctctacgagtacttcaccgtttacaatgagctgaccaaggtgaagtatgtgactgagggcatgaggaagccagcgttcctgagcggcgagcagaagaaggctatcgtggacctgctcttcaagactaaccggaaggtgactgtgaagcagctcaaggaggactacttcaagaagattgagtgcttcgattccgttgagattagcggggtggaggatcggttcaatgcttcgctcgggacataccacgatctcctgaagatcattaaggataaggacttcctcgacaacgaggagaacgaggacattctcgaagatattgtcctgaccctcaccctcttcgaggatcgggagatgatcgaggagaggctcaagacatacgctcatctgttcgatgataaggtcatgaagcagctgaagcgcaggcggtacacagggtgggggcggctgagccggaagctgatcaacgggattcgggataagcagtccgggaagacaattctcgacttcctcaagtccgacgggttcgctaaccggaacttcatgcagctcattcatgatgactcgctgacattcaaggaggatattcagaaggcgcaggtttcggggcagggcgactcgctccacgagcatattgcgaatctggcgggctcccccgcgattaagaagggcattctgcaaaccgtcaaggtggttgatgagctggtcaaggtcatggggcggcataagccagagaatattgtcatcgagatggcgcgggagaatcagaccacacagaaggggcagaagaactcacgggagcggatgaagcgcatcgaggagggcatcaaggagctggggtcgcagatcctgaaggagcatcccgtggagaacactcagctgcaaaatgagaagctgtacctctactacctccagaacgggagggacatgtatgtggatcaggagctggatattaataggctgagcgattacgatgtcgaccacattgtcccacagtcgttcctgaaggacgacagcattgacaacaaggtgctgacccgctcggataagaacaggggcaagagcgataatgttccaagcgaggaggttgtgaagaagatgaagaactactggcggcagctcctgaacgcgaagctcatcacacagcggaagttcgacaacctcaccaaggctgagcgcgggggcctgagcgagctggacaaggcggggttcattaagaggcagctggtcgagacacggcagattacaaagcatgttgcgcagattctcgattcccggatgaacaccaagtacgatgagaacgataagctgattcgggaggtcaaggtaattaccctgaagtccaagctggtgtccgacttcaggaaggacttccagttctacaaggttcgggagatcaacaactaccaccacgcgcatgatgcctacctcaacgcggtcgtggggaccgctctcatcaagaagtacccaaagctggagtcagagttcgtctacggggattacaaggtttacgacgtgcggaagatgatcgctaagagcgagcaggagattggcaaggctaccgctaagtacttcttctactccaacatcatgaacttcttcaagacagagattaccctcgcgaatggcgagatccggaagaggcccctcatcgagacaaatggggagacaggggagattgtctgggataaggggcgggatttcgcgaccgtccggaaggtcctgtcgatgccccaggttaatattgtcaagaagactgaggtccagactggcggcttctcaaaggagtcgattctcccaaagaggaactccgataagctcattgctcggaagaaggattgggaccccaagaagtacgggggattcgactcccccactgttgcttactctgttctggttgttgctaaggtggagaaggggaagtcgaagaagctgaagagcgtgaaggagctgctcgggattacaattatggagaggtcatccttcgagaagaatcccatcgacttcctggaggccaagggctacaaggaggtgaagaaggacctgattattaagctgcccaagtactcgctcttcgagctggagaatgggcggaagcggatgctggcgtccgcgggggagctgcaaaaggggaacgagctggcgctcccctccaagtatgtgaacttcctctacctggcgtcgcactacgagaagctgaaggggtccccagaggataatgagcagaagcagctcttcgtcgagcagcataagcactacctggacgagattatcgagcagattagcgagttctcgaagcgggtcatcctcgcggatgcgaacctggataaggtgctcagcgcctacaataagcaccgggacaagccgattcgggagcaggcggagaatattattcacctcttcacactcaccaacctcggggcaccagctgcgttcaagtacttcgacactactatcgaccggaagcggtacacctcgacgaaggaggtgctcgacgccaccctcattcaccagtcgatcacaggcctgtacgagacacggattgacctgtcccagctcgggggcgac

SEQ ID NO: 81 - DNA, 4101 bp, Synthetic construct
  source 1..4101: mol_type = other DNA
gacaagaagtacagcatcggcctggacatcggcaccaactctgtgggctgggccgtgatcaccgacgagtacaaggtgcccagcaagaaattcaaggtgctgggcaacaccgaccggcacagcatcaagaagaacctgatcggagccctgctgttcgacagcggcgaaacagccgaggccacccggctgaagagaaccgccagaagaagatacaccagacggaagaaccggatctgctatctgcaagagatcttcagcaacgagatggccaaggtggacgacagcttcttccacagactggaagagtccttcctggtggaagaggataagaagcacgagcggcaccccatcttcggcaacatcgtggacgaggtggcctaccacgagaagtaccccaccatctaccacctgagaaagaaactggtggacagcaccgacaaggccgacctgcggctgatctatctggccctggcccacatgatcaagttccggggccacttcctgatcgagggcgacctgaaccccgacaacagcgacgtggacaagctgttcatccagctggtgcagacctacaaccagctgttcgaggaaaaccccatcaacgccagcggcgtggacgccaaggccatcctgtctgccagactgagcaagagcagacggctggaaaatctgatcgcccagctgcccggcgagaagaagaatggcctgttcggaaacctgattgccctgagcctgggcctgacccccaacttcaagagcaacttcgacctggccgaggatgccaaactgcagctgagcaaggacacctacgacgacgacctggacaacctgctggcccagatcggcgaccagtacgccgacctgtttctggccgccaagaacctgtccgacgccatcctgctgagcgacatcctgagagtgaacaccgagatcaccaaggcccccctgagcgcctctatgatcaagagatacgacgagcaccaccaggacctgaccctgctgaaagctctcgtgcggcagcagctgcctgagaagtacaaagagattttcttcgaccagagcaagaacggctacgccggctacattgacggcggagccagccaggaagagttctacaagttcatcaagcccatcctggaaaagatggacggcaccgaggaactgctcgtgaagctgaacagagaggacctgctgcggaagcagcggaccttcgacaacggcagcatcccccaccagatccacctgggagagctgcacgccattctgcggcggcaggaagatttttacccattcctgaaggacaaccgggaaaagatcgagaagatcctgaccttccgcatcccctactacgtgggccctctggccaggggaaacagcagattcgcctggatgaccagaaagagcgaggaaaccatcaccccctggaacttcgaggaagtggtggacaagggcgcttccgcccagagcttcatcgagcggatgaccaacttcgataagaacctgcccaacgagaaggtgctgcccaagcacagcctgctgtacgagtacttcaccgtgtataacgagctgaccaaagtgaaatacgtgaccgagggaatgagaaagcccgccttcctgagcggcgagcagaaaaaggccatcgtggacctgctgttcaagaccaaccggaaagtgaccgtgaagcagctgaaagaggactacttcaagaaaatcgagtgcttcgactccgtggaaatctccggcgtggaagatcggttcaacgcctccctgggcacataccacgatctgctgaaaattatcaaggacaaggacttcctggacaatgaggaaaacgaggacattctggaagatatcgtgctgaccctgacactgtttgaggacagagagatgatcgaggaacggctgaaaacctatgcccacctgttcgacgacaaagtgatgaagcagctgaagcggcggagatacaccggctggggcaggctgagccggaagctgatcaacggcatccgggacaagcagtccggcaagacaatcctggatttcctgaagtccgacggcttcgccaacagaaacttcatgcagctgatccacgacgacagcctgacctttaaagaggacatccagaaagcccaggtgtccggccagggcgatagcctgcacgagcacattgccaatctggccggcagccccgccattaagaagggcatcctgcagacagtgaaggtggtggacgagctcgtgaaagtgatgggccggcacaagcccgagaacatcgtgatcgaaatggccagagagaaccagaccacccagaagggacagaagaacagccgcgagagaatgaagcggatcgaagagggcatcaaagagctgggcagccagatcctgaaagaacaccccgtggaaaacacccagctgcagaacgagaagctgtacctgtactacctgcagaatgggcgggatatgtacgtggaccaggaactggacatcaaccggctgtccgactacgatgtggaccatatcgtgcctcagagctttctgaaggacgactccatcgacaacaaggtgctgaccagaagcgacaagaaccggggcaagagcgacaacgtgccctccgaagaggtcgtgaagaagatgaagaactactggcggcagctgctgaacgccaagctgattacccagagaaagttcgacaatctgaccaaggccgagagaggcggcctgagcgaactggataaggccggcttcatcaagagacagctggtggaaacccggcagatcacaaagcacgtggcacagatcctggactcccggatgaacactaagtacgacgagaatgacaagctgatccgggaagtgaaagtgatcaccctgaagtccaagctggtgtccgatttccggaaggatttccagttttacaaagtgcgcgagatcaacaactaccaccacgcccacgacgcctacctgaacgccgtcgtgggaaccgccctgatcaaaaagtaccctaagctggaaagcgagttcgtgtacggcgactacaaggtgtacgacgtgcggaagatgatcgccaagagcgagcaggaaatcggcaaggctaccgccaagtacttcttctacagcaacatcatgaactttttcaagaccgagattaccctggccaacggcgagatccggaagcggcctctgatcgagacaaacggcgaaaccggggagatcgtgtgggataagggccgggattttgccaccgtgcggaaagtgctgagcatgccccaagtgaatatcgtgaaaaagaccgaggtgcagacaggcggcttcagcaaagagtctatcctgcccaagaggaacagcgataagctgatcgccagaaagaaggactgggaccctaagaagtacggcggcttcgacagccccaccgtggcctattctgtgctggtggtggccaaagtggaaaagggcaagtccaagaaactgaagagtgtgaaagagctgctggggatcaccatcatggaaagaagcagcttcgagaagaatcccatcgactttctggaagccaagggctacaaagaagtgaaaaaggacctgatcatcaagctgcctaagtactccctgttcgagctggaaaacggccggaagagaatgctggcctctgccggcgaactgcagaagggaaacgaactggccctgccctccaaatatgtgaacttcctgtacctggccagccactatgagaagctgaagggctcccccgaggataatgagcagaaacagctgtttgtggaacagcacaagcactacctggacgagatcatcgagcagatcagcgagttctccaagagagtgatcctggccgacgctaatctggacaaagtgctgtccgcctacaacaagcaccgggataagcccatcagagagcaggccgagaatatcatccacctgtttaccctgaccaatctgggagcccctgccgccttcaagtactttgacaccaccatcgaccggaagaggtacaccagcaccaaagaggtgctggacgccaccctgatccaccagagcatcaccggcctgtacgagacacggatcgacctgtctcagctgggaggtgac

SEQ ID NO: 82 - DNA, 4101 bp, Synthetic construct
  source 1..4101: mol_type = other DNA
gacaagaagtacagcatcggcctggacatcggcaccaactctgtgggctgggccgtgatcaccgacgagtacaaggtgcccagcaagaaattcaaggtgctgggcaacaccgaccggcacagcatcaagaagaacctgatcggagccctgctgttcgacagcggcgaaacagccgaggccacccggctgaagagaaccgccagaagaagatacaccagacggaagaaccggatctgctatctgcaagagatcttcagcaacgagatggccaaggtggacgacagcttcttccacagactggaagagtccttcctggtggaagaggataagaagcacgagcggcaccccatcttcggcaacatcgtggacgaggtggcctaccacgagaagtaccccaccatctaccacctgagaaagaaactggtggacagcaccgacaaggccgacctgcggctgatctatctggccctggcccacatgatcaagttccggggccacttcctgatcgagggcgacctgaaccccgacaacagcgacgtggacaagctgttcatccagctggtgcagacctacaaccagctgttcgaggaaaaccccatcaacgccagcggcgtggacgccaaggccatcctgtctgccagactgagcaagagcagacggctggaaaatctgatcgcccagctgcccggcgagaagaagaatggcctgttcggaaacctgattgccctgagcctgggcctgacccccaacttcaagagcaacttcgacctggccgaggatgccaaactgcagctgagcaaggacacctacgacgacgacctggacaacctgctggcccagatcggcgaccagtacgccgacctgtttctggccgccaagaacctgtccgacgccatcctgctgagcgacatcctgagagtgaacaccgagatcaccaaggcccccctgagcgcctctatgatcaagagatacgacgagcaccaccaggacctgaccctgctgaaagctctcgtgcggcagcagctgcctgagaagtacaaagagattttcttcgaccagagcaagaacggctacgccggctacattgacggcggagccagccaggaagagttctacaagttcatcaagcccatcctggaaaagatggacggcaccgaggaactgctcgtgaagctgaacagagaggacctgctgcggaagcagcggaccttcgacaacggcagcatcccccaccagatccacctgggagagctgcacgccattctgcggcggcaggaagatttttacccattcctgaaggacaaccgggaaaagatcgagaagatcctgaccttccgcatcccctactacgtgggccctctggccaggggaaacagcagattcgcctggatgaccagaaagagcgaggaaaccatcaccccctggaacttcgaggaagtggtggacaagggcgcttccgcccagagcttcatcgagcggatgaccaacttcgataagaacctgcccaacgagaaggtgctgcccaagcacagcctgctgtacgagtacttcaccgtgtataacgagctgaccaaagtgaaatacgtgaccgagggaatgagaaagcccgccttcctgagcggcgagcagaaaaaggccatcgtggacctgctgttcaagaccaaccggaaagtgaccgtgaagcagctgaaagaggactacttcaagaaaatcgagtgcttcgactccgtggaaatctccggcgtggaagatcggttcaacgcctccctgggcacataccacgatctgctgaaaattatcaaggacaaggacttcctggacaatgaggaaaacgaggacattctggaagatatcgtgctgaccctgacactgtttgaggacagagagatgatcgaggaacggctgaaaacctatgcccacctgttcgacgacaaagtgatgaagcagctgaagcggcggagatacaccggctggggcaggctgagccggaagctgatcaacggcatccgggacaagcagtccggcaagacaatcctggatttcctgaagtccgacggcttcgccaacagaaacttcatgcagctgatccacgacgacagcctgacctttaaagaggacatccagaaagcccaggtgtccggccagggcgatagcctgcacgagcacattgccaatctggccggcagccccgccattaagaagggcatcctgcagacagtgaaggtggtggacgagctcgtgaaagtgatgggccggcacaagcccgagaacatcgtgatcgaaatggccagagagaaccagaccacccagaagggacagaagaacagccgcgagagaatgaagcggatcgaagagggcatcaaagagctgggcagccagatcctgaaagaacaccccgtggaaaacacccagctgcagaacgagaagctgtacctgtactacctgcagaatgggcgggatatgtacgtggaccaggaactggacatcaaccggctgtccgactacgatgtggaccatatcgtgcctcagagctttctggccgacgactccatcgacaacaaggtgctgaccagaagcgacaagaaccggggcaagagcgacaacgtgccctccgaagaggtcgtgaagaagatgaagaactactggcggcagctgctgaacgccaagctgattacccagagaaagttcgacaatctgaccaaggccgagagaggcggcctgagcgaactggataaggccggcttcatcaagagacagctggtggaaacccggcagatcacaaagcacgtggcacagatcctggactcccggatgaacactaagtacgacgagaatgacaagctgatccgggaagtgaaagtgatcaccctgaagtccaagctggtgtccgatttccggaaggatttccagttttacaaagtgcgcgagatcaacaactaccaccacgcccacgacgcctacctgaacgccgtcgtgggaaccgccctgatcaaaaagtaccctgccctggaaagcgagttcgtgtacggcgactacaaggtgtacgacgtgcggaagatgatcgccaagagcgagcaggaaatcggcaaggctaccgccaagtacttcttctacagcaacatcatgaactttttcaagaccgagattaccctggccaacggcgagatccggaaggcccctctgatcgagacaaacggcgaaaccggggagatcgtgtgggataagggccgggattttgccaccgtgcggaaagtgctgagcatgccccaagtgaatatcgtgaaaaagaccgaggtgcagacaggcggcttcagcaaagagtctatcctgcccaagaggaacagcgataagctgatcgccagaaagaaggactgggaccctaagaagtacggcggcttcgacagccccaccgtggcctattctgtgctggtggtggccaaagtggaaaagggcaagtccaagaaactgaagagtgtgaaagagctgctggggatcaccatcatggaaagaagcagcttcgagaagaatcccatcgactttctggaagccaagggctacaaagaagtgaaaaaggacctgatcatcaagctgcctaagtactccctgttcgagctggaaaacggccggaagagaatgctggcctctgccggcgaactgcagaagggaaacgaactggccctgccctccaaatatgtgaacttcctgtacctggccagccactatgagaagctgaagggctcccccgaggataatgagcagaaacagctgtttgtggaacagcacaagcactacctggacgagatcatcgagcagatcagcgagttctccaagagagtgatcctggccgacgctaatctggacaaagtgctgtccgcctacaacaagcaccgggataagcccatcagagagcaggccgagaatatcatccacctgtttaccctgaccaatctgggagcccctgccgccttcaagtactttgacaccaccatcgaccggaagaggtacaccagcaccaaagaggtgctggacgccaccctgatccaccagagcatcaccggcctgtacgagacacggatcgacctgtctcagctgggaggtgac

SEQ ID NO: 83 - DNA, 4101 bp, Synthetic construct
  source 1..4101: mol_type = other DNA
gacaagaagtacagcatcggcctggccatcggcaccaactctgtgggctgggccgtgatcaccgacgagtacaaggtgcccagcaagaaattcaaggtgctgggcaacaccgaccggcacagcatcaagaagaacctgatcggagccctgctgttcgacagcggcgaaacagccgaggccacccggctgaagagaaccgccagaagaagatacaccagacggaagaaccggatctgctatctgcaagagatcttcagcaacgagatggccaaggtggacgacagcttcttccacagactggaagagtccttcctggtggaagaggataagaagcacgagcggcaccccatcttcggcaacatcgtggacgaggtggcctaccacgagaagtaccccaccatctaccacctgagaaagaaactggtggacagcaccgacaaggccgacctgcggctgatctatctggccctggcccacatgatcaagttccggggccacttcctgatcgagggcgacctgaaccccgacaacagcgacgtggacaagctgttcatccagctggtgcagacctacaaccagctgttcgaggaaaaccccatcaacgccagcggcgtggacgccaaggccatcctgtctgccagactgagcaagagcagacggctggaaaatctgatcgcccagctgcccggcgagaagaagaatggcctgttcggaaacctgattgccctgagcctgggcctgacccccaacttcaagagcaacttcgacctggccgaggatgccaaactgcagctgagcaaggacacctacgacgacgacctggacaacctgctggcccagatcggcgaccagtacgccgacctgtttctggccgccaagaacctgtccgacgccatcctgctgagcgacatcctgagagtgaacaccgagatcaccaaggcccccctgagcgcctctatgatcaagagatacgacgagcaccaccaggacctgaccctgctgaaagctctcgtgcggcagcagctgcctgagaagtacaaagagattttcttcgaccagagcaagaacggctacgccggctacattgacggcggagccagccaggaagagttctacaagttcatcaagcccatcctggaaaagatggacggcaccgaggaactgctcgtgaagctgaacagagaggacctgctgcggaagcagcggaccttcgacaacggcagcatcccccaccagatccacctgggagagctgcacgccattctgcggcggcaggaagatttttacccattcctgaaggacaaccgggaaaagatcgagaagatcctgaccttccgcatcccctactacgtgggccctctggccaggggaaacagcagattcgcctggatgaccagaaagagcgaggaaaccatcaccccctggaacttcgaggaagtggtggacaagggcgcttccgcccagagcttcatcgagcggatgaccaacttcgataagaacctgcccaacgagaaggtgctgcccaagcacagcctgctgtacgagtacttcaccgtgtataacgagctgaccaaagtgaaatacgtgaccgagggaatgagaaagcccgccttcctgagcggcgagcagaaaaaggccatcgtggacctgctgttcaagaccaaccggaaagtgaccgtgaagcagctgaaagaggactacttcaagaaaatcgagtgcttcgactccgtggaaatctccggcgtggaagatcggttcaacgcctccctgggcacataccacgatctgctgaaaattatcaaggacaaggacttcctggacaatgaggaaaacgaggacattctggaagatatcgtgctgaccctgacactgtttgaggacagagagatgatcgaggaacggctgaaaacctatgcccacctgttcgacgacaaagtgatgaagcagctgaagcggcggagatacaccggctggggcaggctgagccggaagctgatcaacggcatccgggacaagcagtccggcaagacaatcctggatttcctgaagtccgacggcttcgccaacagaaacttcatgcagctgatccacgacgacagcctgacctttaaagaggacatccagaaagcccaggtgtccggccagggcgatagcctgcacgagcacattgccaatctggccggcagccccgccattaagaagggcatcctgcagacagtgaaggtggtggacgagctcgtgaaagtgatgggccggcacaagcccgagaacatcgtgatcgaaatggccagagagaaccagaccacccagaagggacagaagaacagccgcgagagaatgaagcggatcgaagagggcatcaaagagctgggcagccagatcctgaaagaacaccccgtggaaaacacccagctgcagaacgagaagctgtacctgtactacctgcagaatgggcgggatatgtacgtggaccaggaactggacatcaaccggctgtccgactacgatgtggaccatatcgtgcctcagagctttctgaaggacgactccatcgacaacaaggtgctgaccagaagcgacaagaaccggggcaagagcgacaacgtgccctccgaagaggtcgtgaagaagatgaagaactactggcggcagctgctgaacgccaagctgattacccagagaaagttcgacaatctgaccaaggccgagagaggcggcctgagcgaactggataaggccggcttcatcaagagacagctggtggaaacccggcagatcacaaagcacgtggcacagatcctggactcccggatgaacactaagtacgacgagaatgacaagctgatccgggaagtgaaagtgatcaccctgaagtccaagctggtgtccgatttccggaaggatttccagttttacaaagtgcgcgagatcaacaactaccaccacgcccacgacgcctacctgaacgccgtcgtgggaaccgccctgatcaaaaagtaccctaagctggaaagcgagttcgtgtacggcgactacaaggtgtacgacgtgcggaagatgatcgccaagagcgagcaggaaatcggcaaggctaccgccaagtacttcttctacagcaacatcatgaactttttcaagaccgagattaccctggccaacggcgagatccggaagcggcctctgatcgagacaaacggcgaaaccggggagatcgtgtgggataagggccgggattttgccaccgtgcggaaagtgctgagcatgccccaagtgaatatcgtgaaaaagaccgaggtgcagacaggcggcttcagcaaagagtctatcctgcccaagaggaacagcgataagctgatcgccagaaagaaggactgggaccctaagaagtacggcggcttcgacagccccaccgtggcctattctgtgctggtggtggccaaagtggaaaagggcaagtccaagaaactgaagagtgtgaaagagctgctggggatcaccatcatggaaagaagcagcttcgagaagaatcccatcgactttctggaagccaagggctacaaagaagtgaaaaaggacctgatcatcaagctgcctaagtactccctgttcgagctggaaaacggccggaagagaatgctggcctctgccggcgaactgcagaagggaaacgaactggccctgccctccaaatatgtgaacttcctgtacctggccagccactatgagaagctgaagggctcccccgaggataatgagcagaaacagctgtttgtggaacagcacaagcactacctggacgagatcatcgagcagatcagcgagttctccaagagagtgatcctggccgacgctaatctggacaaagtgctgtccgcctacaacaagcaccgggataagcccatcagagagcaggccgagaatatcatccacctgtttaccctgaccaatctgggagcccctgccgccttcaagtactttgacaccaccatcgaccggaagaggtacaccagcaccaaagaggtgctggacgccaccctgatccaccagagcatcaccggcctgtacgagacacggatcgacctgtctcagctgggaggtgac

SEQ ID NO: 84 - DNA, 4101 bp, Synthetic construct
  source 1..4101: mol_type = other DNA
gacaagaagtacagcatcggcctggacatcggcaccaactctgtgggctgggccgtgatcaccgacgagtacaaggtgcccagcaagaaattcaaggtgctgggcaacaccgaccggcacagcatcaagaagaacctgatcggagccctgctgttcgacagcggcgaaacagccgaggccacccggctgaagagaaccgccagaagaagatacaccagacggaagaaccggatctgctatctgcaagagatcttcagcaacgagatggccaaggtggacgacagcttcttccacagactggaagagtccttcctggtggaagaggataagaagcacgagcggcaccccatcttcggcaacatcgtggacgaggtggcctaccacgagaagtaccccaccatctaccacctgagaaagaaactggtggacagcaccgacaaggccgacctgcggctgatctatctggccctggcccacatgatcaagttccggggccacttcctgatcgagggcgacctgaaccccgacaacagcgacgtggacaagctgttcatccagctggtgcagacctacaaccagctgttcgaggaaaaccccatcaacgccagcggcgtggacgccaaggccatcctgtctgccagactgagcaagagcagacggctggaaaatctgatcgcccagctgcccggcgagaagaagaatggcctgttcggaaacctgattgccctgagcctgggcctgacccccaacttcaagagcaacttcgacctggccgaggatgccaaactgcagctgagcaaggacacctacgacgacgacctggacaacctgctggcccagatcggcgaccagtacgccgacctgtttctggccgccaagaacctgtccgacgccatcctgctgagcgacatcctgagagtgaacaccgagatcaccaaggcccccctgagcgcctctatgatcaagagatacgacgagcaccaccaggacctgaccctgctgaaagctctcgtgcggcagcagctgcctgagaagtacaaagagattttcttcgaccagagcaagaacggctacgccggctacattgacggcggagccagccaggaagagttctacaagttcatcaagcccatcctggaaaagatggacggcaccgaggaactgctcgtgaagctgaacagagaggacctgctgcggaagcagcggaccttcgacaacggcagcatcccccaccagatccacctgggagagctgcacgccattctgcggcggcaggaagatttttacccattcctgaaggacaaccgggaaaagatcgagaagatcctgaccttccgcatcccctactacgtgggccctctggccaggggaaacagcagattcgcctggatgaccagaaagagcgaggaaaccatcaccccctggaacttcgaggaagtggtggacaagggcgcttccgcccagagcttcatcgagcggatgaccaacttcgataagaacctgcccaacgagaaggtgctgcccaagcacagcctgctgtacgagtacttcaccgtgtataacgagctgaccaaagtgaaatacgtgaccgagggaatgagaaagcccgccttcctgagcggcgagcagaaaaaggccatcgtggacctgctgttcaagaccaaccggaaagtgaccgtgaagcagctgaaagaggactacttcaagaaaatcgagtgcttcgactccgtggaaatctccggcgtggaagatcggttcaacgcctccctgggcacataccacgatctgctgaaaattatcaaggacaaggacttcctggacaatgaggaaaacgaggacattctggaagatatcgtgctgaccctgacactgtttgaggacagagagatgatcgaggaacggctgaaaacctatgcccacctgttcgacgacaaagtgatgaagcagctgaagcggcggagatacaccggctggggcaggctgagccggaagctgatcaacggcatccgggacaagcagtccggcaagacaatcctggatttcctgaagtccgacggcttcgccaacagaaacttcatgcagctgatccacgacgacagcctgacctttaaagaggacatccagaaagcccaggtgtccggccagggcgatagcctgcacgagcacattgccaatctggccggcagccccgccattaagaagggcatcctgcagacagtgaaggtggtggacgagctcgtgaaagtgatgggccggcacaagcccgagaacatcgtgatcgaaatggccagagagaaccagaccacccagaagggacagaagaacagccgcgagagaatgaagcggatcgaagagggcatcaaagagctgggcagccagatcctgaaagaacaccccgtggaaaacacccagctgcagaacgagaagctgtacctgtactacctgcagaatgggcgggatatgtacgtggaccaggaactggacatcaaccggctgtccgactacgatgtggacgccatcgtgcctcagagctttctgaaggacgactccatcgacaacaaggtgctgaccagaagcgacaagaaccggggcaagagcgacaacgtgccctccgaagaggtcgtgaagaagatgaagaactactggcggcagctgctgaacgccaagctgattacccagagaaagttcgacaatctgaccaaggccgagagaggcggcctgagcgaactggataaggccggcttcatcaagagacagctggtggaaacccggcagatcacaaagcacgtggcacagatcctggactcccggatgaacactaagtacgacgagaatgacaagctgatccgggaagtgaaagtgatcaccctgaagtccaagctggtgtccgatttccggaaggatttccagttttacaaagtgcgcgagatcaacaactaccaccacgcccacgacgcctacctgaacgccgtcgtgggaaccgccctgatcaaaaagtaccctaagctggaaagcgagttcgtgtacggcgactacaaggtgtacgacgtgcggaagatgatcgccaagagcgagcaggaaatcggcaaggctaccgccaagtacttcttctacagcaacatcatgaactttttcaagaccgagattaccctggccaacggcgagatccggaagcggcctctgatcgagacaaacggcgaaaccggggagatcgtgtgggataagggccgggattttgccaccgtgcggaaagtgctgagcatgccccaagtgaatatcgtgaaaaagaccgaggtgcagacaggcggcttcagcaaagagtctatcctgcccaagaggaacagcgataagctgatcgccagaaagaaggactgggaccctaagaagtacggcggcttcgacagccccaccgtggcctattctgtgctggtggtggccaaagtggaaaagggcaagtccaagaaactgaagagtgtgaaagagctgctggggatcaccatcatggaaagaagcagcttcgagaagaatcccatcgactttctggaagccaagggctacaaagaagtgaaaaaggacctgatcatcaagctgcctaagtactccctgttcgagctggaaaacggccggaagagaatgctggcctctgccggcgaactgcagaagggaaacgaactggccctgccctccaaatatgtgaacttcctgtacctggccagccactatgagaagctgaagggctcccccgaggataatgagcagaaacagctgtttgtggaacagcacaagcactacctggacgagatcatcgagcagatcagcgagttctccaagagagtgatcctggccgacgctaatctggacaaagtgctgtccgcctacaacaagcaccgggataagcccatcagagagcaggccgagaatatcatccacctgtttaccctgaccaatctgggagcccctgccgccttcaagtactttgacaccaccatcgaccggaagaggtacaccagcaccaaagaggtgctggacgccaccctgatccaccagagcatcaccggcctgtacgagacacggatcgacctgtctcagctgggaggtgac

SEQ ID NO: 85 - protein, 1367 aa, Synthetic construct
DKKYSIGLAIGTNSVGWAVITDEYKVPSKKFKVLGNTDRHSIKKNLIGALLFDSGETAEATRLKRTARRRYTRRKNRICYLQEIFSNEMAKVDDSFFHRLEESFLVEEDKKHERHPIFGNIVDEVAYHEKYPTIYHLRKKLVDSTDKADLRLIYLALAHMIKFRGHFLIEGDLNPDNSDVDKLFIQLVQTYNQLFEENPINASGVDAKAILSARLSKSRRLENLIAQLPGEKKNGLFGNLIALSLGLTPNFKSNFDLAEDAKLQLSKDTYDDDLDNLLAQIGDQYADLFLAAKNLSDAILLSDILRVNTEITKAPLSASMIKRYDEHHQDLTLLKALVRQQLPEKYKEIFFDQSKNGYAGYIDGGASQEEFYKFIKPILEKMDGTEELLVKLNREDLLRKQRTFDNGSIPHQIHLGELHAILRRQEDFYPFLKDNREKIEKILTFRIPYYVGPLARGNSRFAWMTRKSEETITPWNFEEVVDKGASAQSFIERMTNFDKNLPNEKVLPKHSLLYEYFTVYNELTKVKYVTEGMRKPAFLSGEQKKAIVDLLFKTNRKVTVKQLKEDYFKKIECFDSVEISGVEDRFNASLGTYHDLLKIIKDKDFLDNEENEDILEDIVLTLTLFEDREMIEERLKTYAHLFDDKVMKQLKRRRYTGWGRLSRKLINGIRDKQSGKTILDFLKSDGFANRNFMQLIHDDSLTFKEDIQKAQVSGQGDSLHEHIANLAGSPAIKKGILQTVKVVDELVKVMGRHKPENIVIEMARENQTTQKGQKNSRERMKRIEEGIKELGSQILKEHPVENTQLQNEKLYLYYLQNGRDMYVDQELDINRLSDYDVDHIVPQSFLKDDSIDNKVLTRSDKNRGKSDNVPSEEVVKKMKNYWRQLLNAKLITQRKFDNLTKAERGGLSELDKAGFIKRQLVETRQITKHVAQILDSRMNTKYDENDKLIREVKVITLKSKLVSDFRKDFQFYKVREINNYHHAHDAYLNAVVGTALIKKYPKLESEFVYGDYKVYDVRKMIAKSEQEIGKATAKYFFYSNIMNFFKTEITLANGEIRKRPLIETNGETGEIVWDKGRDFATVRKVLSMPQVNIVKKTEVQTGGFSKESILPKRNSDKLIARKKDWDPKKYGGFDSPTVAYSVLVVAKVEKGKSKKLKSVKELLGITIMERSSFEKNPIDFLEAKGYKEVKKDLIIKLPKYSLFELENGRKRMLASAGELQKGNELALPSKYVNFLYLASHYEKLKGSPEDNEQKQLFVEQHKHYLDEIIEQISEFSKRVILADANLDKVLSAYNKHRDKPIREQAENIIHLFTLTNLGAPAAFKYFDTTIDRKRYTSTKEVLDATLIHQSITGLYETRIDLSQLGGD

SEQ ID NO: 86 - protein, 1367 aa, Synthetic construct
DKKYSIGLAIGTNSVGWAVITDEYKVPSKKFKVLGNTDRHSIKKNLIGALLFDSGETAEATRLKRTARRRYTRRKNRICYLQEIFSNEMAKVDDSFFHRLEESFLVEEDKKHERHPIFGNIVDEVAYHEKYPTIYHLRKKLVDSTDKADLRLIYLALAHMIKFRGHFLIEGDLNPDNSDVDKLFIQLVQTYNQLFEENPINASGVDAKAILSARLSKSRRLENLIAQLPGEKKNGLFGNLIALSLGLTPNFKSNFDLAEDAKLQLSKDTYDDDLDNLLAQIGDQYADLFLAAKNLSDAILLSDILRVNTEITKAPLSASMIKRYDEHHQDLTLLKALVRQQLPEKYKEIFFDQSKNGYAGYIDGGASQEEFYKFIKPILEKMDGTEELLVKLNREDLLRKQRTFDNGSIPHQIHLGELHAILRRQEDFYPFLKDNREKIEKILTFRIPYYVGPLARGNSRFAWMTRKSEETITPWNFEEVVDKGASAQSFIERMTNFDKNLPNEKVLPKHSLLYEYFTVYNELTKVKYVTEGMRKPAFLSGEQKKAIVDLLFKTNRKVTVKQLKEDYFKKIECFDSVEISGVEDRFNASLGTYHDLLKIIKDKDFLDNEENEDILEDIVLTLTLFEDREMIEERLKTYAHLFDDKVMKQLKRRRYTGWGRLSRKLINGIRDKQSGKTILDFLKSDGFANRNFMQLIHDDSLTFKEDIQKAQVSGQGDSLHEHIANLAGSPAIKKGILQTVKVVDELVKVMGRHKPENIVIEMARENQTTQKGQKNSRERMKRIEEGIKELGSQILKEHPVENTQLQNEKLYLYYLQNGRDMYVDQELDINRLSDYDVDHIVPQSFLADDSIDNKVLTRSDKNRGKSDNVPSEEVVKKMKNYWRQLLNAKLITQRKFDNLTKAERGGLSELDKAGFIKRQLVETRQITKHVAQILDSRMNTKYDENDKLIREVKVITLKSKLVSDFRKDFQFYKVREINNYHHAHDAYLNAVVGTALIKKYPALESEFVYGDYKVYDVRKMIAKSEQEIGKATAKYFFYSNIMNFFKTEITLANGEIRKAPLIETNGETGEIVWDKGRDFATVRKVLSMPQVNIVKKTEVQTGGFSKESILPKRNSDKLIARKKDWDPKKYGGFDSPTVAYSVLVVAKVEKGKSKKLKSVKELLGITIMERSSFEKNPIDFLEAKGYKEVKKDLIIKLPKYSLFELENGRKRMLASAGELQKGNELALPSKYVNFLYLASHYEKLKGSPEDNEQKQLFVEQHKHYLDEIIEQISEFSKRVILADANLDKVLSAYNKHRDKPIREQAENIIHLFTLTNLGAPAAFKYFDTTIDRKRYTSTKEVLDATLIHQSITGLYETRIDLSQLGGD

SEQ ID NO: 87 - protein, 1409 aa, Streptococcus thermophilus
MLFNKCIIISINLDFSNKEKCMTKPYSIGLDIGTNSVGWAVITDNYKVPSKKMKVLGNTSKKYIKKNLLGVLLFDSGITAEGRRLKRTARRRYTRRRNRILYLQEIFSTEMATLDDAFFQRLDDSFLVPDDKRDSKYPIFGNLVEEKVYHDEFPTIYHLRKYLADSTKKADLRLVYLALAHMIKYRGHFLIEGEFNSKNNDIQKNFQDFLDTYNAIFESDLSLENSKQLEEIVKDKISKLEKKDRILKLFPGEKNSGIFSEFLKLIVGNQADFRKCFNLDEKASLHFSKESYDEDLETLLGYIGDDYSDVFLKAKKLYDAILLSGFLTVTDNETEAPLSSAMIKRYNEHKEDLALLKEYIRNISLKTYNEVFKDDTKNGYAGYIDGKTNQEDFYVYLKNLLAEFEGADYFLEKIDREDFLRKQRTFDNGSIPYQIHLQEMRAILDKQAKFYPFLAKNKERIEKILTFRIPYYVGPLARGNSDFAWSIRKRNEKITPWNFEDVIDKESSAEAFINRMTSFDLYLPEEKVLPKHSLLYETFNVYNELTKVRFIAESMRDYQFLDSKQKKDIVRLYFKDKRKVTDKDIIEYLHAIYGYDGIELKGIEKQFNSSLSTYHDLLNIINDKEFLDDSSNEAIIEEIIHTLTIFEDREMIKQRLSKFENIFDKSVLKKLSRRHYTGWGKLSAKLINGIRDEKSGNTILDYLIDDGISNRNFMQLIHDDALSFKKKIQKAQIIGDEDKGNIKEVVKSLPGSPAIKKGILQSIKIVDELVKVMGGRKPESIVVEMARENQYTNQGKSNSQQRLKRLEKSLKELGSKILKENIPAKLSKIDNNALQNDRLYLYYLQNGKDMYTGDDLDIDRLSNYDIDHIIPQAFLKDNSIDNKVLVSSASNRGKSDDFPSLEVVKKRKTFWYQLLKSKLISQRKFDNLTKAERGGLLPEDKAGFIQRQLVETRQITKHVARLLDEKFNNKKDENNRAVRTVKIITLKSTLVSQFRKDFELYKVREINDFHHAHDAYLNAVIASALLKKYPKLEPEFVYGDYPKYNSFRERKSATEKVYFYSNIMNIFKKSISLADGRVIERPLIEVNEETGESVWNKESDLATVRRVLSYPQVNVVKKVEEQNHGLDRGKPKGLFNANLSSKPKPNSNENLVGAKEYLDPKKYGGYAGISNSFAVLVKGTIEKGAKKKITNVLEFQGISILDRINYRKDKLNFLLEKGYKDIELIIELPKYSLFELSDGSRRMLASILSTNNKRGEIHKGNQIFLSQKFVKLLYHAKRISNTINENHRKYVENHKKEFEELFYYILEFNENYVGAKKNGKLLNSAFQSWQNHSIDELCSSFIGPTGSERKGLFELTSRGSAADFEFLGVKIPRYRDYTPSSLLKDATLIHQSVTGLYETRIDLAKLGEG

SEQ ID NO: 88 - protein, 1053 aa, Staphylococcus aureus
MKRNYILGLDIGITSVGYGIIDYETRDVIDAGVRLFKEANVENNEGRRSKRGARRLKRRRRHRIQRVKKLLFDYNLLTDHSELSGINPYEARVKGLSQKLSEEEFSAALLHLAKRRGVHNVNEVEEDTGNELSTKEQISRNSKALEEKYVAELQLERLKKDGEVRGSINRFKTSDYVKEAKQLLKVQKAYHQLDQSFIDTYIDLLETRRTYYEGPGEGSPFGWKDIKEWYEMLMGHCTYFPEELRSVKYAYNADLYNALNDLNNLVITRDENEKLEYYEKFQIIENVFKQKKKPTLKQIAKEILVNEEDIKGYRVTSTGKPEFTNLKVYHDIKDITARKEIIENAELLDQIAKILTIYQSSEDIQEELTNLNSELTQEEIEQISNLKGYTGTHNLSLKAINLILDELWHTNDNQIAIFNRLKLVPKKVDLSQQKEIPTTLVDDFILSPVVKRSFIQSIKVINAIIKKYGLPNDIIIELAREKNSKDAQKMINEMQKRNRQTNERIEEIIRTTGKENAKYLIEKIKLHDMQEGKCLYSLEAIPLEDLLNNPFNYEVDHIIPRSVSFDNSFNNKVLVKQEENSKKGNRTPFQYLSSSDSKISYETFKKHILNLAKGKGRISKTKKEYLLEERDINRFSVQKDFINRNLVDTRYATRGLMNLLRSYFRVNNLDVKVKSINGGFTSFLRRKWKFKKERNKGYKHHAEDALIIANADFIFKEWKKLDKAKKVMENQMFEEKQAESMPEIETEQEYKEIFITPHQIKHIKDFKDYKYSHRVDKKPNRELINDTLYSTRKDDKGNTLIVNNLNGLYDKDNDKLKKLINKSPEKLLMYHHDPQTYQKLKLIMEQYGDEKNPLYKYYEETGNYLTKYSKKDNGPVIKKIKYYGNKLNAHLDITDDYPNSRNKVVKLSLKPYRFDVYLDNGVYKFVTVKNLDVIKKENYYEVNSKCYEEAKKLKKISNQAEFIASFYNNDLIKINGELYRVIGVNNDLLNRIEVNMIDITYREYLENMNDKRPPRIIKTIASKTQSIKKYSTDILGNLYEVKSKKHPQIIKKG

SEQ ID NO: 89 - protein, 1629 aa, Francisella tularensis
MNFKILPIAIDLGVKNTGVFSAFYQKGTSLERLDNKNGKVYELSKDSYTLLMNNRTARRHQRRGIDRKQLVKRLFKLIWTEQLNLEWDKDTQQAISFLFNRRGFSFITDGYSPEYLNIVPEQVKAILMDIFDDYNGEDDLDSYLKLATEQESKISEIYNKLMQKILEFKLMKLCTDIKDDKVSTKTLKEITSYEFELLADYLANYSESLKTQKFSYTDKQGNLKELSYYHHDKYNIQEFLKRHATINDRILDTLLTDDLDIWNFNFEKFDFDKNEEKLQNQEDKDHIQAHLHHFVFAVNKIKSEMASGGRHRSQYFQEITNVLDENNHQEGYLKNFCENLHNKKYSNLSVKNLVNLIGNLSNLELKPLRKYFNDKIHAKADHWDEQKFTETYCHWILGEWRVGVKDQDKKDGAKYSYKDLCNELKQKVTKAGLVDFLLELDPCRTIPPYLDNNNRKPPKCQSLILNPKFLDNQYPNWQQYLQELKKLQSIQNYLDSFETDLKVLKSSKDQPYFVEYKSSNQQIASGQRDYKDLDARILQFIFDRVKASDELLLNEIYFQAKKLKQKASSELEKLESSKKLDEVIANSQLSQILKSQHTNGIFEQGTFLHLVCKYYKQRQRARDSRLYIMPEYRYDKKLHKYNNTGRFDDDNQLLTYCNHKPRQKRYQLLNDLAGVLQVSPNFLKDKIGSDDDLFISKWLVEHIRGFKKACEDSLKIQKDNRGLLNHKINIARNTKGKCEKEIFNLICKIEGSEDKKGNYKHGLAYELGVLLFGEPNEASKPEFDRKIKKFNSIYSFAQIQQIAFAERKGNANTCAVCSADNAHRMQQIKITEPVEDNKDKIILSAKAQRLPAIPTRIVDGAVKKMATILAKNIVDDNWQNIKQVLSAKHQLHIPIITESNAFEFEPALADVKGKSLKDRRKKALERISPENIFKDKNNRIKEFAKGISAYSGANLTDGDFDGAKEELDHIIPRSHKKYGTLNDEANLICVTRGDNKNKGNRIFCLRDLADNYKLKQFETTDDLEIEKKIADTIWDANKKDFKFGNYRSFINLTPQEQKAFRHALFLADENPIKQAVIRAINNRNRTFVNGTQRYFAEVLANNIYLRAKKENLNTDKISFDYFGIPTIGNGRGIAEIRQLYEKVDSDIQAYAKGDKPQASYSHLIDAMLAFCIAADEHRNDGSIGLEIDKNYSLYPLDKNTGEVFTKDIFSQIKITDNEFSDKKLVRKKAIEGFNTHRQMTRDGIYAENYLPILIHKELNEVRKGYTWKNSEEIKIFKGKKYDIQQLNNLVYCLKFVDKPISIDIQISTLEELRNILTTNNIAATAEYYYINLKTQKLHEYYIENYNTALGYKKYSKEMEFLRSLAYRSERVKIKSIDDVKQVLDKDSNFIIGKITLPFKKEWQRLYREWQNTTIKDDYEFLKSFFNVKSITKLHKKVRKDFSLPISTNEGKFLVKRKTWDNNFIYQILNDSDSRADGTKPFIPAFDISKNEIVEAIIDSFTSKNIFWLPKNIELQKVDNKNIFAIDTSKWFEVETPSDLRDIGIATIQYKIDNNSRPKVRVKLDYVIDDDSKINYFMNHSLLKSRYPDKVLEILKQSTIIEFESSGFNKTIKEMLGMKLAGIYNETSNN

SEQ ID NO: 90 - protein, 1101 aa, Actinomyces naeslundii
MWYASLMSAHHLRVGIDVGTHSVGLATLRVDDHGTPIELLSALSHIHDSGVGKEGKKDHDTRKKLSGIARRARRLLHHRRTQLQQLDEVLRDLGFPIPTPGEFLDLNEQTDPYRVWRVRARLVEEKLPEELRGPAISMAVRHIARHRGWRNPYSKVESLLSPAEESPFMKALRERILATTGEVLDDGITPGQAMAQVALTHNISMRGPEGILGKLHQSDNANEIRKICARQGVSPDVCKQLLRAVFKADSPRGSAVSRVAPDPLPGQGSFRRAPKCDPEFQRFRIISIVANLRISETKGENRPLTADERRHVVTFLTEDSQADLTWVDVAEKLGVHRRDLRGTAVHTDDGERSAARPPIDATDRIMRQTKISSLKTWWEEADSEQRGAMIRYLYEDPTDSECAEIIAELPEEDQAKLDSLHLPAGRAAYSRESLTALSDHMLATTDDLHEARKRLFGVDDSWAPPAEAINAPVGNPSVDRTLKIVGRYLSAVESMWGTPEVIHVEHVRDGFTSERMADERDKANRRRYNDNQEAMKKIQRDYGKEGYISRGDIVRLDALELQGCACLYCGTTIGYHTCQLDHIVPQAGPGSNNRRGNLVAVCERCNRSKSNTPFAVWAQKCGIPHVGVKEAIGRVRGWRKQTPNTSSEDLTRLKKEVIARLRRTQEDPEIDERSMESVAWMANELHHRIAAAYPETTVMVYRGSITAAARKAAGIDSRINLIGEKGRKDRIDRRHHAVDASVVALMEASVAKTLAERSSLRGEQRLTGKEQTWKQYTGSTVGAREHFEMWRGHMLHLTELFNERLAEDKVYVTQNIRLRLSDGNAHTVNPSKLVSHRLGDGLTVQQIDRACTPALWCALTREKDFDEKNGLPAREDRAIRVHGHEIKSSDYIQVFSKRKKTDSDRDETPFGAIAVRGGFVEIGPSIHHARIYRVEGKKPVYAMLRVFTHDLLSQRHGDLFSAVIPPQSISMRCAEPKLRKAITTGNATYLGWVVVGDELEINVDSFTKYAIGRFLEDFPNTTRWRICGYDTNSKLTLKPIVLAAEGLENPSSAVNEIVELKGWRVAINVLTKVHPTVVRRDALGRPRYSSRSNLPTSWTIE

SEQ ID NO: 91 - protein, 1082 aa, Neisseria meningitidis
MAAFKPNSINYILGLDIGIASVGWAMVEIDEEENPIRLIDLGVRVFERAEVPKTGDSLAMARRLARSVRRLTRRRAHRLLRTRRLLKREGVLQAANFDENGLIKSLPNTPWQLRAAALDRKLTPLEWSAVLLHLIKHRGYLSQRKNEGETADKELGALLKGVAGNAHALQTGDFRTPAELALNKFEKESGHIRNQRSDYSHTFSRKDLQAELILLFEKQKEFGNPHVSGGLKEGIETLLMTQRPALSGDAVQKMLGHCTFEPAEPKAAKNTYTAERFIWLTKLNNLRILEQGSERPLTDTERATLMDEPYRKSKLTYAQARKLLGLEDTAFFKGLRYGKDNAEASTLMEMKAYHAISRALEKEGLKDKKSPLNLSPELQDEIGTAFSLFKTDEDITGRLKDRIQPEILEALLKHISFDKFVQISLKALRRIVPLMEQGKRYDEACAEIYGDHYGKKNTEEKIYLPPIPADEIRNPVVLRALSQARKVINGVVRRYGSPARIHIETAREVGKSFKDRKEIEKRQEENRKDREKAAAKFREYFPNFVGEPKSKDILKLRLYEQQHGKCLYSGKEINLGRLNEKGYVEIDHALPFSRTWDDSFNNKVLVLGSENQNKGNQTPYEYFNGKDNSREWQEFKARVETSRFPRSKKQRILLQKFDEDGFKERNLNDTRYVNRFLCQFVADRMRLTGKGKKRVFASNGQITNLLRGFWGLRKVRAENDRHHALDAVVVACSTVAMQQKITRFVRYKEMNAFDGKTIDKETGEVLHQKTHFPQPWEFFAQEVMIRVFGKPDGKPEFEEADTLEKLRTLLAEKLSSRPEAVHEYVTPLFVSRAPNRKMSGQGHMETVKSAKRLDEGVSVLRVPLTQLKLKDLEKMVNREREPKLYEALKARLEAHKDDPAKAFAEPFYKYDKAGNRTQQVKAVRVEQVQKTGVWVRNHNGIADNATMVRVDVFEKGDKYYLVPIYSWQVAKGILPDRAVVQGKDEEDWQLIDDSFNFKFSLHPNDLVEVITKKARMFGYFASCHRGTGNINIRIHDLDHKIGKNGILEGIGVKTALSFQKYQIDELGKEIRPCRLKKRPPVR

SEQ ID NO: 92 - protein, 1334 aa, Listeria innocua
MKKPYTIGLDIGTNSVGWAVLTDQYDLVKRKMKIAGDSEKKQIKKNFWGVRLFDEGQTAADRRMARTARRRIERRRNRISYLQGIFAEEMSKTDANFFCRLSDSFYVDNEKRNSRHPFFATIEEEVEYHKNYPTIYHLREELVNSSEKADLRLVYLALAHIIKYRGNFLIEGALDTQNTSVDGIYKQFIQTYNQVFASGIEDGSLKKLEDNKDVAKILVEKVTRKEKLERILKLYPGEKSAGMFAQFISLIVGSKGNFQKPFDLIEKSDIECAKDSYEEDLESLLALIGDEYAELFVAAKNAYSAVVLSSIITVAETETNAKLSASMIERFDTHEEDLGELKAFIKLHLPKHYEEIFSNTEKHGYAGYIDGKTKQADFYKYMKMTLENIEGADYFIAKIEKENFLRKQRTFDNGAIPHQLHLEELEAILHQQAKYYPFLKENYDKIKSLVTFRIPYFVGPLANGQSEFAWLTRKADGEIRPWNIEEKVDFGKSAVDFIEKMTNKDTYLPKENVLPKHSLCYQKYLVYNELTKVRYINDQGKTSYFSGQEKEQIFNDLFKQKRKVKKKDLELFLRNMSHVESPTIEGLEDSFNSSYSTYHDLLKVGIKQEILDNPVNTEMLENIVKILTVFEDKRMIKEQLQQFSDVLDGVVLKKLERRHYTGWGRLSAKLLMGIRDKQSHLTILDYLMNDDGLNRNLMQLINDSNLSFKSIIEKEQVTTADKDIQSIVADLAGSPAIKKGILQSLKIVDELVSVMGYPPQTIVVEMARENQTTGKGKNNSRPRYKSLEKAIKEFGSQILKEHPTDNQELRNNRLYLYYLQNGKDMYTGQDLDIHNLSNYDIDHIVPQSFITDNSIDNLVLTSSAGNREKGDDVPPLEIVRKRKVFWEKLYQGNLMSKRKFDYLTKAERGGLTEADKARFIHRQLVETRQITKNVANILHQRFNYEKDDHGNTMKQVRIVTLKSALVSQFRKQFQLYKVRDVNDYHHAHDAYLNGVVANTLLKVYPQLEPEFVYGDYHQFDWFKANKATAKKQFYTNIMLFFAQKDRIIDENGEILWDKKYLDTVKKVMSYRQMNIVKKTEIQKGEFSKATIKPKGNSSKLIPRKTNWDPMKYGGLDSPNMAYAVVIEYAKGKNKLVFEKKIIRVTIMERKAFEKDEKAFLEEQGYRQPKVLAKLPKYTLYECEEGRRRMLASANEAQKGNQQVLPNHLVTLLHHAANCEVSDGKSLDYIESNREMFAELLAHVSEFAKRYTLAEANLNKINQLFEQNKEGDIKAIAQSFVDLMAFNAMGAPASFKFFETTIERKRYNNLKELLNSTIIYQSITGLYESRKRLDD

SEQ ID NO: 93 - protein, 1345 aa, Streptococcus mutans
MKKPYSIGLDIGTNSVGWAVVTDDYKVPAKKMKVLGNTDKSHIEKNLLGALLFDSGNTAEDRRLKRTARRRYTRRRNRILYLQEIFSEEMGKVDDSFFHRLEDSFLVTEDKRGERHPIFGNLEEEVKYHENFPTIYHLRQYLADNPEKVDLRLVYLALAHIIKFRGHFLIEGKFDTRNNDVQRLFQEFLAVYDNTFENSSLQEQNVQVEEILTDKISKSAKKDRVLKLFPNEKSNGRFAEFLKLIVGNQADFKKHFELEEKAPLQFSKDTYEEELEVLLAQIGDNYAELFLSAKKLYDSILLSGILTVTDVGTKAPLSASMIQRYNEHQMDLAQLKQFIRQKLSDKYNEVFSDVSKDGYAGYIDGKTNQEAFYKYLKGLLNKIEGSGYFLDKIEREDFLRKQRTFDNGSIPHQIHLQEMRAIIRRQAEFYPFLADNQDRIEKLLTFRIPYYVGPLARGKSDFAWLSRKSADKITPWNFDEIVDKESSAEAFINRMTNYDLYLPNQKVLPKHSLLYEKFTVYNELTKVKYKTEQGKTAFFDANMKQEIFDGVFKVYRKVTKDKLMDFLEKEFDEFRIVDLTGLDKENKVFNASYGTYHDLCKILDKDFLDNSKNEKILEDIVLTLTLFEDREMIRKRLENYSDLLTKEQVKKLERRHYTGWGRLSAELIHGIRNKESRKTILDYLIDDGNSNRNFMQLINDDALSFKEEIAKAQVIGETDNLNQVVSDIAGSPAIKKGILQSLKIVDELVKIMGHQPENIVVEMARENQFTNQGRRNSQQRLKGLTDSIKEFGSQILKEHPVENSQLQNDRLFLYYLQNGRDMYTGEELDIDYLSQYDIDHIIPQAFIKDNSIDNRVLTSSKENRGKSDDVPSKDVVRKMKSYWSKLLSAKLITQRKFDNLTKAERGGLTDDDKAGFIKRQLVETRQITKHVARILDERFNTETDENNKKIRQVKIVTLKSNLVSNFRKEFELYKVREINDYHHAHDAYLNAVIGKALLGVYPQLEPEFVYGDYPHFHGHKENKATAKKFFYSNIMNFFKKDDVRTDKNGEIIWKKDEHISNIKKVLSYPQVNIVKKVEEQTGGFSKESILPKGNSDKLIPRKTKKFYWDTKKYGGFDSPIVAYSILVIADIEKGKSKKLKTVKALVGVTIMEKMTFERDPVAFLERKGYRNVQEENIIKLPKYSLFKLENGRKRLLASARELQKGNEIVLPNHLGTLLYHAKNIHKVDEPKHLDYVDKHKDEFKELLDVVSNFSKKYTLAEGNLEKIKELYAQNNGEDLKELASSFINLLTFTAIGAPATFKFFDKNIDRKRYTSTTEILNATLIHQSITGLYETRIDLNKLGGD

SEQ ID NO: 94 - protein, 1084 aa, Corynebacterium diphtheriae
MKYHVGIDVGTFSVGLAAIEVDDAGMPIKTLSLVSHIHDSGLDPDEIKSAVTRLASSGIARRTRRLYRRKRRRLQQLDKFIQRQGWPVIELEDYSDPLYPWKVRAELAASYIADEKERGEKLSVALRHIARHRGWRNPYAKVSSLYLPDGPSDAFKAIREEIKRASGQPVPETATVGQMVTLCELGTLKLRGEGGVLSARLQQSDYAREIQEICRMQEIGQELYRKIIDVVFAAESPKGSASSRVGKDPLQPGKNRALKASDAFQRYRIAALIGNLRVRVDGEKRILSVEEKNLVFDHLVNLTPKKEPEWVTIAEILGIDRGQLIGTATMTDDGERAGARPPTHDTNRSIVNSRIAPLVDWWKTASALEQHAMVKALSNAEVDDFDSPEGAKVQAFFADLDDDVHAKLDSLHLPVGRAAYSEDTLVRLTRRMLSDGVDLYTARLQEFGIEPSWTPPTPRIGEPVGNPAVDRVLKTVSRWLESATKTWGAPERVIIEHVREGFVTEKRAREMDGDMRRRAARNAKLFQEMQEKLNVQGKPSRADLWRYQSVQRQNCQCAYCGSPITFSNSEMDHIVPRAGQGSTNTRENLVAVCHRCNQSKGNTPFAIWAKNTSIEGVSVKEAVERTRHWVTDTGMRSTDFKKFTKAVVERFQRATMDEEIDARSMESVAWMANELRSRVAQHFASHGTTVRVYRGSLTAEARRASGISGKLKFFDGVGKSRLDRRHHAIDAAVIAFTSDYVAETLAVRSNLKQSQAHRQEAPQWREFTGKDAEHRAAWRVWCQKMEKLSALLTEDLRDDRVVVMSNVRLRLGNGSAHKETIGKLSKVKLSSQLSVSDIDKASSEALWCALTREPGFDPKEGLPANPERHIRVNGTHVYAGDNIGLFPVSAGSIALRGGYAELGSSFHHARVYKITSGKKPAFAMLRVYTIDLLPYRNQDLFSVELKPQTMSMRQAEKKLRDALATGNAEYLGWLVVDDELVVDTSKIATDQVKAVEAELGTIRRWRVDGFFSPSKLRLRPLQMSKEGIKKESAPELSKIIDRPGWLPAVNKLFSDGNVTVVRRDSLGRVRLESTAHLPVTWKVQ

SEQ ID NO: 95 - protein, 228 aa, Rattus norvegicus
SSETGPVAVDPTLRRRIEPHEFEVFFDPRELRKETCLLYEINWGGRHSIWRHTSQNTNKHVEVNFIEKFTTERYFCPNTRCSITWFLSWSPCGECSRAITEFLSRYPHVTLFIYIARLYHHADPRNRQGLRDLISSGVTIQIMTEQESGYCWRNFVNYSPSNEAHWPRYPHLWVRLYVLELYCIILGLPPCLNILRRKQPQLTFFTIALQSCHYQRLPPHILWATGLK

SEQ ID NO: 96 - protein, 199 aa, Homo sapiens
MEASPASGPRHLMDPHIFTSNFNNGIGRHKTYLCYEVERLDNGTSVKMDQHRGFLHNQAKNLLCGFYGRHAELRFLDLVPSLQLDPAQIYRVTWFISWSPCFSWGCAGEVRAFLQENTHVRLRIFAARIYDYDPLYKEALQMLRDAGAQVSIMTYDEFKHCWDTFVDHQGCPFQPWDGLDEHSQALSGRLRAILQNQGN

SEQ ID NO: 97 - DNA, 621 bp, Petromyzon marinus
  source 1..621: mol_type = genomic DNA
acagatgcagagtatgtgagaattcacgaaaagctggacatctataccttcaagaagcagttctttaacaataagaagtctgtgagccataggtgctacgtgctgttcgagctgaagagaaggggtgaaagaagggcatgtttttgggggtatgctgtgaacaagccccagtctggaactgagagaggcattcacgccgaaattttcagcatcagaaaggtggaggaatacctgagggataaccctggacagtttacaattaattggtattctagctggtctccatgcgctgactgtgccgagaagatcctggaatggtacaaccaggagctgagaggaaatggccataccctgaagatttgggcctgcaagctgtactatgaaaagaacgcaagaaatcagatcggactgtggaacctgagggataatggtgtggggctgaacgtgatggtgtccgagcactatcagtgctgtagaaagattttcattcagtcctcacataatcagctgaacgagaatagatggctggaaaagactctgaagagggctgagaagagaaggtccgaactgtcaattatgatccaggtgaagatcctgcacaccactaagtcacctgccgtg

SEQ ID NO: 98 - protein, 160 aa, Unidentified
FERNYDPRELRKETYLLYEIKWGKSGKLWRHWCQNNRTQHAEVYFLENIFNARRFNPSTHCSITWYLSWSPCAECSQKIVDFLKEHPNVLEIYVARLYYHEDERNRQGLRDLVNSGVTIRIMDLPDYNYCWKTFVSDQGGDEDYWPGHFAPWIKQYSLKL

SEQ ID NO: 99 - protein, 229 aa, Rattus norvegicus [sequence omitted]

SEQ ID NO: 100 - protein, 198 aa, Homo sapiens [sequence omitted]

SEQ ID NO: 101 - protein, 197 aa, Unidentified
MDSLLMNRREFLYQFKNVRWAKGRRETYLCYVVKRRDSATSFSLDFGYLRNKNGCHVELLFLRYISDWDLDPGRCYRVTWFISWSPCYDCARHVADFLRGNPNLSLRIFTARLYFCEDRKAEPEGLRRLHRAGVQIAIMTFKDYFYCWNTFVENHGRTFKAWEGLHENSVRLSRQLRRILLPLYEVDDLRDAFRTCT

SEQ ID NO: 102 - protein, 207 aa, Unidentified
TDAEYVRIHEKLDIYTFKKQFSNNKKSVSHRCYVLFELKRRGERRACFWGYAVNKPQSGTERGIHAEIFSIRKVEEYLRDNPGQFTINWYSSWSPCADCAEKILEWYNQELRGNGHTLKIWVCKLYYEKNARNQIGLWNLRDNGVGLNVMVSEHYQCCRKIFIQSSHNQLNENRWLEKTLKRAEKRRSELSIMFQVKILHTTKSPAV

SEQ ID NO: 103 - protein, 228 aa, Unidentified
SSKTGPVAVDPTLRRRIEPHEFEVFFDPRELRKETCLLYEINWGGRHSIWRHTSQNTNKHVEVNFIEKFTTERYFCPNTRCSITWFLSWSPCGECSRAITEFLSRYPNVTLFIYIARLYHLANPRNRQGLRDLISSGVTIQIMTEQESGYCWHNFVNYSPSNESHWPRYPHLWVRLYVLELYCIILGLPPCLNILRRKQSQLTSFTIALQSCHYQRLPPHILWATGLK

SEQ ID NO: 104 - protein, 162 aa, Unidentified
SFERNYDPRELRKETYLLYEIKWGKSGKLWRHWCQNNRTQHAEVYFLENIFNARRFNPSTHCSITWYLSWSPCAECSQKIVDFLKEHPNVNLEIYVARLYYPENERNRQGLRDLVNSGVTIRIMDLPDYNYCWKTFVSDQGGDEDYWPGHFAPWIKQYSLKL

SEQ ID NO: 105 - protein, 166 aa, Escherichia coli
SEVEFSHEYWMRHALTLAKRAWDEREVPVGAVLVHNNRVIGEGWNRPIGRHDPTAHAEIMALRQGGLVMQNYRLIDATLYVTLEPCVMCAGAMIHSRIGRVVFGARDAKTGAAGSLMDVLHHPGMNHRVEITEGILADECAALLSDFFRMRRQEIKAQKKAQSSTD

SEQ ID NO: 106 - protein, 166 aa, Escherichia coli
SEVEFSHEYWMRHALTLAKRARDEREVPVGAVLVLNNRVIGEGWNRAIGLHDPTAHAEIMALRQGGLVMQNYRLIDATLYVTFEPCVMCAGAMIHSRIGRVVFGVRNSKRGAAGSLMNVLNYPGMNHRVEITEGILADECAALLCDFYRMPRQVFNAQKKAQSSIN

SEQ ID NO: 107 - protein, 166 aa, Unidentified
SEVEFSHEYWMRHALTLAKRARDEREVPVGAVLVLNNRVIGEGWNRAIGLHDPTAHAEIMALRQGGLVMQNYRLIDATLYVTFEPCVMCAGAMIHSRIGRVVFGVRNAKTGAAGSLMDVLHYPGMNHRVEITEGILADECAALLCYFFRMPRQVFNAQKKAQSSTD

SEQ ID NO: 108 - protein, 166 aa, Unidentified
SEVEFSHEYWMRHALTLAKRAWDEREVPVGAVLVLNNRVIGEGWNRSIGLHDPTAHAEIMALRQGGLVMQNYRLIDATLYVTFEPCVMCAGAMIHSRIGRVVFGVRNAKTGAAGSLMDVLHYPGMNHRVEITEGILADECAALLCYFFRMRRQVFNAQKKAQSSTD

SEQ ID NO: 109 - protein, 166 aa, Unidentified
SEVEFSHEYWMRHALTLAKRALDEREVPVGAVLVLNNRVIGEGWNRAIGLHDPTAHAEIMALRQGGLVMQNYRLIDATLYVTFEPCVMCAGAMIHSRIGRVVFGVRNAKTGAAGSLMDVLHYPGMNHRVEITEGILADECNALLCYFFRMRRQVFNAQKKAQSSTD

SEQ ID NO: 110 - protein, 166 aa, Unidentified
SEVEFSHEYWMRHALTLAKRALDEREVPVGAVLVLNNRVIGEGWNRAIGLHDPTAHAEIMALRQGGLVMQNYRLIDATLYVTFEPCVMCAGAMIHSRIGRVVFGVRNAKTGAAGSLMDVLHYPGMNHRVEITEGILADECNALLCYFFRMPRQVFNAQKKAQSSTD

SEQ ID NO: 111 - protein, 1763 aa, Unidentified
SEVEFSHEYWMRHALTLAKRAWDEREVPVGAVLVHNNRVIGEGWNRPIGRHDPTAHAEIMALRQGGLVMQNYRLIDATLYVTLEPCVMCAGAMIHSRIGRVVFGARDAKTGAAGSLMDVLHHPGMNHRVEITEGILADECAALLSDFFRMRRQEIKAQKKAQSSTDSGGSSGGSSGSETPGTSESATPESSGGSSGGSSEVEFSHEYWMRHALTLAKRARDEREVPVGAVLVLNNRVIGEGWNRAIGLHDPTAHAEIMALRQGGLVMQNYRLIDATLYVTFEPCVMCAGAMIHSRIGRVVFGVRNAKTGAAGSLMDVLHYPGMNHRVEITEGILADECAALLCYFFRMPRQVFNAQKKAQSSTDSGGSSGGSSGSETPGTSESATPESSGGSSGGSDKKYSIGLAIGTNSVGWAVITDEYKVPSKKFKVLGNTDRHSIKKNLIGALLFDSGETAEATRLKRTARRRYTRRKNRICYLQEIFSNEMAKVDDSFFHRLEESFLVEEDKKHERHPIFGNIVDEVAYHEKYPTIYHLRKKLVDSTDKADLRLIYLALAHMIKFRGHFLIEGDLNPDNSDVDKLFIQLVQTYNQLFEENPINASGVDAKAILSARLSKSRRLENLIAQLPGEKKNGLFGNLIALSLGLTPNFKSNFDLAEDAKLQLSKDTYDDDLDNLLAQIGDQYADLFLAAKNLSDAILLSDILRVNTEITKAPLSASMIKRYDEHHQDLTLLKALVRQQLPEKYKEIFFDQSKNGYAGYIDGGASQEEFYKFIKPILEKMDGTEELLVKLNREDLLRKQRTFDNGSIPHQIHLGELHAILRRQEDFYPFLKDNREKIEKILTFRIPYYVGPLARGNSRFAWMTRKSEETITPWNFEEVVDKGASAQSFIERMTNFDKNLPNEKVLPKHSLLYEYFTVYNELTKVKYVTEGMRKPAFLSGEQKKAIVDLLFKTNRKVTVKQLKEDYFKKIECFDSVEISGVEDRFNASLGTYHDLLKIIKDKDFLDNEENEDILEDIVLTLTLFEDREMIEERLKTYAHLFDDKVMKQLKRRRYTGWGRLSRKLINGIRDKQSGKTILDFLKSDGFANRNFMQLIHDDSLTFKEDIQKAQVSGQGDSLHEHIANLAGSPAIKKGILQTVKVVDELVKVMGRHKPENIVIEMARENQTTQKGQKNSRERMKRIEEGIKELGSQILKEHPVENTQLQNEKLYLYYLQNGRDMYVDQELDINRLSDYDVDHIVPQSFLKDDSIDNKVLTRSDKNRGKSDNVPSEEVVKKMKNYWRQLLNAKLITQRKFDNLTKAERGGLSELDKAGFIKRQLVETRQITKHVAQILDSRMNTKYDENDKLIREVKVITLKSKLVSDFRKDFQFYKVREINNYHHAHDAYLNAVVGTALIKKYPKLESEFVYGDYKVYDVRKMIAKSEQEIGKATAKYFFYSNIMNFFKTEITLANGEIRKRPLIETNGETGEIVWDKGRDFATVRKVLSMPQVNIVKKTEVQTGGFSKESILPKRNSDKLIARKKDWDPKKYGGFDSPTVAYSVLVVAKVEKGKSKKLKSVKELLGITIMERSSFEKNPIDFLEAKGYKEVKKDLIIKLPKYSLFELENGRKRMLASAGELQKGNELALPSKYVNFLYLASHYEKLKGSPEDNEQKQLFVEQHKHYLDEIIEQISEFSKRVILADANLDKVLSAYNKHRDKPIREQAENIIHLFTLTNLGAPAAFKYFDTTIDRKRYTSTKEVLDATLIHQSITGLYETRIDLSQLGGD

SEQ ID NO: 112 - protein, 1565 aa, Unidentified
SEVEFSHEYWMRHALTLAKRARDEREVPVGAVLVLNNRVIGEGWNRAIGLHDPTAHAEIMALRQGGLVMQNYRLIDATLYVTFEPCVMCAGAMIHSRIGRVVFGVRNSKRGAAGSLMNVLNYPGMNHRVEITEGILADECAALLCDFYRMPRQVFNAQKKAQSSINSGGSSGGSSGSETPGTSESATPESSGGSSGGSDKKYSIGLAIGTNSVGWAVITDEYKVPSKKFKVLGNTDRHSIKKNLIGALLFDSGETAEATRLKRTARRRYTRRKNRICYLQEIFSNEMAKVDDSFFHRLEESFLVEEDKKHERHPIFGNIVDEVAYHEKYPTIYHLRKKLVDSTDKADLRLIYLALAHMIKFRGHFLIEGDLNPDNSDVDKLFIQLVQTYNQLFEENPINASGVDAKAILSARLSKSRRLENLIAQLPGEKKNGLFGNLIALSLGLTPNFKSNFDLAEDAKLQLSKDTYDDDLDNLLAQIGDQYADLFLAAKNLSDAILLSDILRVNTEITKAPLSASMIKRYDEHHQDLTLLKALVRQQLPEKYKEIFFDQSKNGYAGYIDGGASQEEFYKFIKPILEKMDGTEELLVKLNREDLLRKQRTFDNGSIPHQIHLGELHAILRRQEDFYPFLKDNREKIEKILTFRIPYYVGPLARGNSRFAWMTRKSEETITPWNFEEVVDKGASAQSFIERMTNFDKNLPNEKVLPKHSLLYEYFTVYNELTKVKYVTEGMRKPAFLSGEQKKAIVDLLFKTNRKVTVKQLKEDYFKKIECFDSVEISGVEDRFNASLGTYHDLLKIIKDKDFLDNEENEDILEDIVLTLTLFEDREMIEERLKTYAHLFDDKVMKQLKRRRYTGWGRLSRKLINGIRDKQSGKTILDFLKSDGFANRNFMQLIHDDSLTFKEDIQKAQVSGQGDSLHEHIANLAGSPAIKKGILQTVKVVDELVKVMGRHKPENIVIEMARENQTTQKGQKNSRERMKRIEEGIKELGSQILKEHPVENTQLQNEKLYLYYLQNGRDMYVDQELDINRLSDYDVDHIVPQSFLKDDSIDNKVLTRSDKNRGKSDNVPSEEVVKKMKNYWRQLLNAKLITQRKFDNLTKAERGGLSELDKAGFIKRQLVETRQITKHVAQILDSRMNTKYDENDKLIREVKVITLKSKLVSDFRKDFQFYKVREINNYHHAHDAYLNAVVGTALIKKYPKLESEFVYGDYKVYDVRKMIAKSEQEIGKATAKYFFYSNIMNFFKTEITLANGEIRKRPLIETNGETGEIVWDKGRDFATVRKVLSMPQVNIVKKTEVQTGGFSKESILPKRNSDKLIARKKDWDPKKYGGFDSPTVAYSVLVVAKVEKGKSKKLKSVKELLGITIMERSSFEKNPIDFLEAKGYKEVKKDLIIKLPKYSLFELENGRKRMLASAGELQKGNELALPSKYVNFLYLASHYEKLKGSPEDNEQKQLFVEQHKHYLDEIIEQISEFSKRVILADANLDKVLSAYNKHRDKPIREQAENIIHLFTLTNLGAPAAFKYFDTTIDRKRYTSTKEVLDATLIHQSITGLYETRIDLSQLGGD

SEQ ID NO: 113 - protein, 1565 aa, Unidentified
SEVEFSHEYWMRHALTLAKRARDEREVPVGAVLVLNNRVIGEGWNRAIGLHDPTAHAEIMALRQGGLVMQNYRLYDATLYSTFEPCVMCAGAMIHSRIGRVVFGVRNAKTGAAGSLMDVLHHPGMNHRVEITEGILADECAALLCRFFRMPRRVFNAQKKAQSSTDSGGSSGGSSGSETPGTSESATPESSGGSSGGSDKKYSIGLAIGTNSVGWAVITDEYKVPSKKFKVLGNTDRHSIKKNLIGALLFDSGETAEATRLKRTARRRYTRRKNRICYLQEIFSNEMAKVDDSFFHRLEESFLVEEDKKHERHPIFGNIVDEVAYHEKYPTIYHLRKKLVDSTDKADLRLIYLALAHMIKFRGHFLIEGDLNPDNSDVDKLFIQLVQTYNQLFEENPINASGVDAKAILSARLSKSRRLENLIAQLPGEKKNGLFGNLIALSLGLTPNFKSNFDLAEDAKLQLSKDTYDDDLDNLLAQIGDQYADLFLAAKNLSDAILLSDILRVNTEITKAPLSASMIKRYDEHHQDLTLLKALVRQQLPEKYKEIFFDQSKNGYAGYIDGGASQEEFYKFIKPILEKMDGTEELLVKLNREDLLRKQRTFDNGSIPHQIHLGELHAILRRQEDFYPFLKDNREKIEKILTFRIPYYVGPLARGNSRFAWMTRKSEETITPWNFEEVVDKGASAQSFIERMTNFDKNLPNEKVLPKHSLLYEYFTVYNELTKVKYVTEGMRKPAFLSGEQKKAIVDLLFKTNRKVTVKQLKEDYFKKIECFDSVEISGVEDRFNASLGTYHDLLKIIKDKDFLDNEENEDILEDIVLTLTLFEDREMIEERLKTYAHLFDDKVMKQLKRRRYTGWGRLSRKLINGIRDKQSGKTILDFLKSDGFANRNFMQLIHDDSLTFKEDIQKAQVSGQGDSLHEHIANLAGSPAIKKGILQTVKVVDELVKVMGRHKPENIVIEMARENQTTQKGQKNSRERMKRIEEGIKELGSQILKEHPVENTQLQNEKLYLYYLQNGRDMYVDQELDINRLSDYDVDHIVPQSFLKDDSIDNKVLTRSDKNRGKSDNVPSEEVVKKMKNYWRQLLNAKLITQRKFDNLTKAERGGLSELDKAGFIKRQLVETRQITKHVAQILDSRMNTKYDENDKLIREVKVITLKSKLVSDFRKDFQFYKVREINNYHHAHDAYLNAVVGTALIKKYPKLESEFVYGDYKVYDVRKMIAKSEQEIGKATAKYFFYSNIMNFFKTEITLANGEIRKRPLIETNGETGEIVWDKGRDFATVRKVLSMPQVNIVKKTEVQTGGFSKESILPKRNSDKLIARKKDWDPKKYGGFDSPTVAYSVLVVAKVEKGKSKKLKSVKELLGITIMERSSFEKNPIDFLEAKGYKEVKKDLIIKLPKYSLFELENGRKRMLASAGELQKGNELALPSKYVNFLYLASHYEKLKGSPEDNEQKQLFVEQHKHYLDEIIEQISEFSKRVILADANLDKVLSAYNKHRDKPIREQAENIIHLFTLTNLGAPAAFKYFDTTIDRKRYTSTKEVLDATLIHQSITGLYETRIDLSQLGGD

SEQ ID NO: 114 - protein, 364 aa, Unidentified
SEVEFSHEYWMRHALTLAKRAWDEREVPVGAVLVHNNRVIGEGWNRPIGRHDPTAHAEIMALRQGGLVMQNYRLIDATLYVTLEPCVMCAGAMIHSRIGRVVFGARDAKTGAAGSLMDVLHHPGMNHRVEITEGILADECAALLSDFFRMRRQEIKAQKKAQSSTDSGGSSGGSSGSETPGTSESATPESSGGSSGGSSEVEFSHEYWMRHALTLAKRARDEREVPVGAVLVLNNRVIGEGWNRAIGLHDPTAHAEIMALRQGGLVMQNYRLIDATLYVTFEPCVMCAGAMIHSRIGRVVFGVRNAKTGAAGSLMDVLHYPGMNHRVEITEGILADECAALLCYFFRMPRQVFNAQKKAQSSTD

SEQ ID NO: 115 - protein, 167 aa, Unidentified
MSEVEFSHEYWMRHALTLAKRARDEREVPVGAVLVLNNRVIGEGWNRAIGLHDPTAHAEIMALRQGGLVMQNYRLYDATLYSTFEPCVMCAGAMIHSRIGRVVFGVRNAKTGAAGSLMDVLHHPGMNHRVEITEGILADECAALLCRFFRMPRRVFNAQKKAQSSTD

SEQ ID NO: 116 - protein, 167 aa, Unidentified
MSEVEFSHEYWMRHALTLAKRARDEREVPVGAVLVLNNRVIGEGWNRAIGLHDPTAHAEIMALRQGGLVMQNYRLIDATLYVTFEPCVMCAGAMIHSRIGRVVFGVRNSKRGAAGSLMNVLNYPGMNHRVEITEGILADECAALLCDFYRMPRQVFNAQKKAQSSIN

SEQ ID NO: 117 - protein, 83 aa, unidentified
  source 1..83: note = Takahashivirus sp., Bacillus phage
TNLSDIIEKETGKQLVIQESILMLPEEVEEVIGNKPESDILVHTAYDESTDENVMLLTSDAPEYKPWALVIQDSNGENKIKML

SEQ ID NO: 118 - DNA, 66 bp, Saccharomyces bayanus
  source 1..66: mol_type = genomic DNA
ttcttgtcgtacttatagatcgctacgttatttcaattttgaaaatctgagtcctgggagtgcgga

SEQ ID NO: 119 - protein, 605 aa, Homo sapiens
MSGWESYYKTEGDEEAEEEQEENLEASGDYKYSGRDSLIFLVDASKAMFESQSEDELTPFDMSIQCIQSVYISKIISSDRDLLAWFYGTEKDKNSVNFKIYVLQELDNPGAKRILELDQFKGQQGQKRFQDMMGHGSDYSLSEVLWVCANLFSDVQFKMSHKRIMLFTNEDNPHGNDSAKASRARTKAGDLRDTGIFLDLHLKKPGGFDISLFYRDIISIAEDEDLRVHFEESSKLEDLLRKVRAKETRKRALSRLKLKLNKDIVISVGIYNLVQKALKPPPIKLYRETNEPVKTKTRTFNTSTGGLLLPSDTKRSQIYGSRQIILEKEETEELKRFDDPGLMLMGFKPLVLLKKHHYLRPSLFVYPEESLVIGSSTLFSALLIKCLEKEVAALCRYTPRRNIPPYFVALVPQEEELDDQKIQVTPPGFQLVFLPFADDKRKMPFTEKIMATPEQVGKMKAIVEKLRFTYRSDSFENPVLQQHFRNLEALALDLMEPEQAVDLTLPKVEAMNKRLGSLVDEFKELVYPPDYNPEGKVTKRKHDNEGSGSKRPKVEYSEEELKTHISKGTLGKFTVPLKEACRAYGLKSGLKKQELLEALTKHFQD

SEQ ID NO: 120 - protein, 482 aa, Synthetic construct
MVRSGNKAAWLCMDVGFTMSNSIPGIESPFEQAKKVITMFVQRQVFAENKDEIALVLFGTDGTDNPLSGGDQYQNITVHRHLMLPDFDLLEDIESKIQPGSQQADFLDALIVSMDVIQHETIGKKFEKRHIEIFTDLSSRFSKSQLDIIIHSLKKCDISERHSIHWPCRLTIGSNLSIRIAAYKSILQERVKKTTWDAKTLKKEDIQKETVYCLNDDDETEVLKEDIIQGFRYGSDIVPFSKVDEEQMKYKSEGKCFSVLGFCKSSQVQRRFFMGNQVLKVFAARDDEAAAVALSSLIHALDDLDIWAIVRYAYDKRANPQVGVAFPHIKHNYECLVYVQLPFMEDLRQYMFSSLKNSKKYAPTEAQLNAVDALIDSMSLAKKDEKTDTLEDLFPTTKIPNPRFQRLFQCLLHRALHPREPLPPIQQHIWNMLNPPAEVTTKSQIPLSKIKTLFPLIEAKKKDQVTAQEIFQDNHEDGPTAK

SEQ ID NO: 121 - DNA, 10 bp, Methanobacterium thermoautotrophicum
  source 1..10: mol_type = genomic DNA
aatttttgga

SEQ ID NO: 122 - protein, 83 aa, Methanobacterium thermoautotrophicum
GSVIDVSSQRVNVQRPLDALGNSLNSPVIIKLKGDREFRGVLKSFDLHMNLVLNDAEELEDGEVTRRLGTVLIRGDNIVYISP

SEQ ID NO: 123 - DNA, 25 bp, Emesvirus zinderi
  source 1..25: mol_type = genomic DNA
gcgcacatgaggatcacccatgtgc

SEQ ID NO: 124 - protein, 116 aa, Emesvirus zinderi
MASNFTQFVLVDNGGTGDVTVAPSNFANGIAEISSNSRSQAYKVTCSVRQSSAQNRKYTIKVEVPKGAWRSYLNMELTIPIFATNSDCELIVKAMQGLLKDGNPIPSAIAANSGIY

SEQ ID NO: 125 - DNA, 26 bp, Pepevirus rubrum
  source 1..26: mol_type = genomic DNA
ataaggagtttatatggaaaccctta

SEQ ID NO: 126 - protein, 127 aa, Pepevirus rubrum
MSKTIVLSVGEATRTLTEIQSTADRQIFEEKVGPLVGRLRLTASLRQNGAKTAYRVNLKLDQADWDCSTSVCGELPKVRYTQVWSHDVTIVANSTEASRKSLYDLTKSLVATSQVEDLVVNLVPLGR

SEQ ID NO: 127 - DNA, 19 bp, Shigella flexneri
  source 1..19: mol_type = genomic DNA
ctgaatgcctgcgagcatc

SEQ ID NO: 128 - protein, 62 aa, Shigella flexneri
MKSIRCKNCNKLLFKADSFDHIEIRCPRCKRHIIMLNACEHPTEKHCGKREKITHSDETVRY

SEQ ID NO: 129 - protein, 24 aa, Synthetic construct
EELLSKNYHLENEVARLKKGSGSG

SEQ ID NO: 130 - protein, 241 aa, Synthetic construct
EEELLSKNYHLENEVARLKKGSGSGEELLSKNYHLENEVARLKKGSGSGEELLSKNYHLENEVARLKKGSGSGEELLSKNYHLENEVARLKKGSGSGEELLSKNYHLENEVARLKKGSGSGEELLSKNYHLENEVARLKKGSGSGEELLSKNYHLENEVARLKKGSGSGEELLSKNYHLENEVARLKKGSGSGEELLSKNYHLENEVARLKKGSGSGEELLSKNYHLENEVARLKKGSGSG

SEQ ID NO: 131 - protein, 277 aa, Synthetic construct
MGPDIVMTQSPSSLSASVGDRVTITCRSSTGAVTTSNYASWVQEKPGKLFKGLIGGTNNRAPGVPSRFSGSLIGDKATLTISSLQPEDFATYFCALWYSNHWVFGQGTKVELKRGGGGSGGGGSGGGGSSGGGSEVKLLESGGGLVQPGGSLKLSCAVSGFSLTDYGVNWVRQAPGRGLEWIGVIWGDGITDYNSALKDRFIISKDNGKNTVYLQMSKVRSDDTALYYCVTGLFDYWGQGTLVTVSSYPYDVPDYAGGGGGSGGGGSGGGGSGGGGS

SEQ ID NO: 132 - protein, 24 aa, Synthetic construct
EELLSKNYHLENEVARLKKGSGSG

SEQ ID NO: 133 - protein, 241 aa, Synthetic construct; identical to SEQ ID NO: 130

SEQ ID NO: 134 - protein, 277 aa, Synthetic construct; identical to SEQ ID NO: 131

SEQ ID NO: 135 - protein, 19 aa, Synthetic construct
MKRTADGSEFESPKKKRKV

SEQ ID NO: 136 - protein, 21 aa, Synthetic construct
SGGSKRTADGSEFEPKKKRKV

SEQ ID NO: 137 - protein, 7 aa, Synthetic construct
PKKKRKV

SEQ ID NO: 138 - protein, 10 aa, Synthetic construct
GSKKRRIKQD

SEQ ID NO: 139 - protein, 24 aa, Synthetic construct
SGGSKRTADGSEFEPKKKRKVGSG

SEQ ID NO: 140 - protein, 28 aa, Synthetic construct
TKYDSGGSKRTADGSEFEPKKKRKVGSG

SEQ ID NO: 141 - DNA, 57 bp, Synthetic construct
  source 1..57: mol_type = other DNA
atgaaacggacagccgacggaagcgagttcgagtcaccaaagaagaagcggaaagtc

SEQ ID NO: 142 - DNA, 63 bp, Synthetic construct
  source 1..63: mol_type = other DNA
tctggcggctcaaaaagaaccgccgacggcagcgaattcgagcccaagaagaagaggaaagtc

SEQ ID NO: 143 - DNA, 30 bp, Synthetic construct
  source 1..30: mol_type = other DNA
ggatctaagaagagaagaattaaacaagat

SEQ ID NO: 144 - DNA, 72 bp, Synthetic construct
  source 1..72: mol_type = other DNA
tctggcggctcaaaaagaaccgccgacggcagcgaattcgagcccaagaagaagaggaaagtcggaagcgga

SEQ ID NO: 145 - DNA, 84 bp, Synthetic construct
  source 1..84: mol_type = other DNA
actaagtatgattctggcggctcaaaaagaaccgccgacggcagcgaattcgagcccaagaagaagaggaaagtcggaagcgga

SEQ ID NO: 146 - protein, 677 aa, Synthetic construct
TLNIEDEYRLHETSKEPDVSLGSTWLSDFPQAWAETGGMGLAVRQAPLIILLKATSTPVSIKQYPMRQKARLGIKPHIQRLLDQGILVPCQSPWNTPLLPVKKPGTNDYRPVQDLREVNKRVEDIHPTVPNPYNLLSGLPPSHQWYTVLDLKDAFFCLRLHPTSQPLFAFEWRDPEMGISGQLTWTRLPQGFKNSPALFNEALRRDLADFRIQHPDLILLQYVDDLLLAATSELDCQQGTRALLQTLGDLGYRASAKKAQICQKQVKYLGYLLKEGQRWLTEARKETVMGQPTPKTPRQLRKFLGKAGNCRLFIPGFAEMAAPLYPLTKPGTLFNWGPDQQKAYQEIKQALLTAPALGLPDLTKPFELFVDEKQGYAKGVLTQKLGPWRRPVAYLSKKLDPVAAGWPPCLRMVAAIAVLTKDAGKLTMGQPLVIGAPHAVEALVKQPPDRWLSKARMTHYQALLLDTDRVQFGPVVALNPATLLPLPEEGLQHNCLDILAEAHGTRPDLTDQPLPDADHTWYTGGSSLLQEGQRKAGAAVTTETEVIWAKALPAGTSAQRAELIALTQALRMAEGKKLNVYTNSRYAFATAHIQGEIYRRRGWLTSEGKEIKNKDEILALLKALFLPKRLSIIHCPGHQKGHSAEARGNRMANQAARKAAITENPDTSTLPIENSSP

SEQ ID NO: 147 - protein, 677 aa, Synthetic construct
TVSLQDEHRLFDIPVTTSLPDVWLQDFPQAWAETGGLGRAKCQAPIIIDLKPTAVPVSIKQYPMSLEAHMGIRQHIIKFLELGVLRPCRSPWNTPLLPVKKPGTQDYRPVQDLREINKRTVDIHPTVPNPYNLLSTLKPDYSWYTVLDLKDAFFCLPLAPQSQELFAFEWKDPERGISGQLTWTRLPQGFKNSPTLFNEALHRDLTDFRTQHPEVTLLQYVDDLLLAAPTKKACTQGTRHLLQELGEKGYRASAKKAQICQTKVTYLGYILSEGKRWLTPGRIETVARIPPPRNPREVREFLGKAGFCRLFIPGFAELAAPLYALTKPSTPFTWQTEHQLAFEALKKALLSAPALGLPDTSKPFTLFLDERQGIAKGVLTQKLGPWKRPVAYLSKKLDPVAAGWPPCLRIMAATAMLVKDSAKLTLGQPLTVITPHTLEAIVRQPPDRWITNARLTHYQALLLDTDRVQFGPPVTLNPATLLPVPENQPSPHDCRQVLAETHGTREDLKDQELPDADHTWYTDGSSYLDSGTRRAGAAVVDGHNTIWAQSLPPGTSAQKAELIALTKALELSKGKKANIYTDSRYAFATAHTHGSIYERRGWLTSEGKEIKNKAEIIALLKALFLPQEVAIIHCPGHQKGQDPVAVGNRQADRVARQAAMAEVLTLATEPDNTSHIT

SEQ ID NO: 148 - protein, 673 aa, Synthetic construct
LVLNLEEEYRLNEKPVPPSIDPSWLQLFPMVWAEKAGMGLANQVPPVVVELKSDASPVAVRQYPMSKEAREGIRPHIQRFLDLGILVPCQSPWNTPLLPVKKPGTNDYRPVQDLREVNKRVQDIHPTVPNPYNLLSSLPPSHTWYSVLDLKDAFFCLKLHPNSQPLFAFEWRDPEKGNTGQLTWTRLPQGFKNSPTLFNEALHRDLASFRALNPQVVMLQYVDDLLVAAPTYRDCKEGTRRLLQELSKLGYRVSAKKAQLCREEVTYLGYLLKGGKRWLTPARKATVMKIPTPTTPRQVREFLGKAGFCRLFIPGFASLAAPLYPLTRPKVPFTWTEAHQEAFGRIKEALLSAPALALPDLTKPFALYVDEKEGVARGVLTQTLGPWRRPVAYLSKKLDPVASGWPTCLKAIAAVALLLKDADKLTLGQNVLVIAPHNLESIVRQPPDRWMTNARMTHYQSLLLNERVSFAPPAILNPATLLPVESDDTPIHICSEILAEETGTRPDLRDQPLPGVPAWYTDGSSFIMDGRRQAGAAIVDNKRTVWASNLPEGTSAQKAELIALTQALRLAEGKSINIYTDSRYAFATAHVHGAIYKQRGWLTSAGKDIKNKEEILALLEAIHLPKRVAIIHCPGHQRGTDPVATGNRKADEAAKQAAQSTRILTETTKNQEH

SEQ ID NO: 149 - protein, 673 aa, Synthetic construct
TAPLEEEYRLFLEAPIQNVTLLEQWKREIPKVWAEINPPGLASTQAPIHVQLLSTALPVRVRQYPITLEAKRSLRETIRKFRAAGILRPVHSPWNTPLLPVRKSGTSEYRMVQDLREVNKRVETIHPTVPNPYTLLSLLPPDRIWYSVLDLKDAFFCIPLAPESQLIFAFEWADAEEGESGQLTWTRLPQGFKNSPTLFNEALNRDLQGFRLDHPSVSLLQYVDDLLIAADTQAACLSATRDLLMTLAELGYRVSGKKAQLCQEEVTYLGFKIHKGSRSLSNSRTQAILQIPVPKTKRQVREFLGKIGYCRLFIPGFAELAQPLYAATRGGNDPLVWGEKEEEAFQSLKLALTQPPALALPSLDKPFQLFVEETSGAAKGVLTQALGPWKRPVAYLSKRLDPVAAGWPRCLRAIAAAALLTREASKLTFGQDIEITSSHNLESLLRSPPDKWLTNARITQYQVLLLDPPRVRFKQTAALNPATLLPETDDTLPIHHCLDTLDSLTSTRPDLTDQPLAQAEATLFTDGSSYIRDGKRYAGAAVVTLDSVIWAEPLPIGTSAQKAELIALTKALEWSKDKSVNIYTDSRYAFATLHVHGMIYRERGWLTAGGKAIKNAPEILALLTAVWLPKRVAVMHCKGHQKDDAPTSTGNRRADEVAREVAIRPLSTQATIS

SEQ ID NO: 150 - protein, 673 aa, Synthetic construct
TAPLEEEYRLFLEAPIQNVTLLEQWKREIPKVWAEINPPGLASTQAPIHVQLLSTALPVRVRQYPITLEAKRSLRETIRKFRAAGILRPVHSPWNTPLLPVRKSGTSEYRMVQDLREVNKRVETIHPTVPNPYTLLSLLPPDRIWYSVLDLKDAFFCIPLAPESQLIFAFEWADAEEGESGQLTWTRLPQGFKNSPTLFNEALNRDLQGFRLDHPSVSLLQYVDDLLIAADTQAACLSATRDLLMTLAELGYRVSGKKAQLCQEEVTYLGFKIHKGSRSLSNSRTQAILQIPVPKTKRQVREFLGKIGYCRLFIPGFAELAQPLYAATRPGNDPLVWGEKEEEAFQSLKLALTQPPALALPSLDKPFQLFVEETSGAAKGVLTQALGPWKRPVAYLSKRLDPVAAGWPRCLRAIAAAALLTREASKLTFGQDIEITSSHNLESLLRSPPDKWLTNARITQYQVLLLDPPRVRFKQTAALNPATLLPETDDTLPIHHCLDTLDSLTSTRPDLTDQPLAQAEATLFTDGSSYIRDGKRYAGAAVVTLDSVIWAEPLPIGTSAQKAELIALTKALEWSKDKSVNIYTDSRYAFATLHVHGMIYRERGWLTAGGKAIKNAPEILALLTAVWLPKRVAVMHCKGHQKDDAPTSTGNRRADEVAREVAIRPLSTQATIS

SEQ ID NO: 151 - protein, 671 aa, Synthetic construct
TLNIEDEYRLHETSKGPDVPLGSTWLSDFPQAWAETGGMGLAVRQAPLIIPLRAASTPVSIKQYPMSREARLGIKPHIQRLLDQGILVPCQSPWNTPLLPVKKPGTNDYRPVQDLREVNKRVEDIHPTVPNPYNLLSGLPPSHQWYTVLDLKDAFFCLRLHPTSQSLFAFEWRDPEMGISGQLTWTRLPQGFKNSPTLFNEALHRDLADFRIQHPDLILLQYVDDLLLAATSELDCQQGTRALLQTLGDLGYRASAKKAQICQKQVKYLGYLLKEGQRWLTEARKETVMGQPTPKTPRQLREFLGKAGFCRLFIPGFAEMAAPLYPLTKPGTLFKWGPDQQKAYQEIKQALLTAPALGLPDLTKPFELFVDEKQGYAKGVLTQKLGPWRRPVAYLSKKLDPVAAGWPPCLRMVAAIAVLTKDAGKLTMGQPLVILAPHAVEALVKQPPDRWLSNARMTHYQALLLDTDRVQFGPIVTLNPATLLPLPEEGLQHDCLDILAEAHGTRPDLTDQPLPDADHTWYTDGSSFLQEGQRKAGAAVTTETEVIWAKALPAGTSAQRAELIALTQALKMAEGKKLNVYTDSRYAFATAHIHGEIYRRRGWLTSEGKEIKNKEEILALLKALFLPKRLSIIHCPGHQKGNRAEARGNRMADQAAREVATRETPETSTLL

SEQ ID NO: 152 - protein, 560 aa, Synthetic construct
PISPIETVPVKLKPGMDGPKVKQWPLTEEKIKALVEICTEMEKEGKISKIGPENPYNTPVFAIKKKDSTKWRKLVDFRELNKRTQDFWEVQLGIPHPAGLKKKKSVTVLDVGDAYFSVPLDEDFRKYTAFTIPSINNETPGIRYQYNVLPQGWKGSPAIFNSSMTKILEPFRKQNPDIVIYQYMDDLYVGSDLEIGQHRTKIEELRQHLLRWGLTTPDKKHQKEPPFLWMGYELHPDKWTVQPIVLPEKDSWTVNDIQKLVGKLNWASQFYPGIKVRQLCKLLRGTKALTEVIPLTEPAELELAENREILKEPVHGVYYDPSKDLIAEIQKQGQGQWTYQIYQEPFKNLKTGKYARMRGAHTNDVKQLTEAVQKITTESIVIWGKTPKFKLPIQKETWETWWTEYWQATWIPEWEFVNTPPLVKLWYQLEKEPIVGAETFYVDGAANRETKLGKAGYVTNRGRQKVVTLTDTTNQKTELQAIYLALQDSGLEVNIVTDSQYALGIIQAQPDQSESELVNQIIEQLIKKEKVYLAWVPAHKGIGGNEQVDKLVSAGIRKVL

SEQ ID NO: 153 - protein, 751 aa, Synthetic construct
MNPLQLLQPLPAEIKGTKLLAHWDSGATITCIPESFLEDEQPIKKTLIKTIHGEKQQNVYYVTFKVKGRKVEAEVIASPYEYILLSPTDVPWLTQQPLQLTILVPLQEYQEKILSKTALPEDQKQQLKTLFVKYDNLWQHWENQVGHRKIRPHNIATGDYPPRPQKQYPINPKAKPSIQIVIDDLLKQGVLTPQNSTMNTPVYPVPKPDGRWRMVLDYREVNKTIPLTAAQNQHSAGILATIVRQKYKTTLDLANGFWAHPITPESYWLTAFTWQGKQYCWTRLPQGFLNSPALFTADVVDLLKEIPNVQVYVDDIYLSHDDPKEHVQQLEKVFQILLQAGYVVSLKKSEIGQKTVEFLGFNITKEGRGLTDTFKTKLLNITPPKDLKQLQSILGLLNFARNFIPNFAELVQPLYNLIASAKGKYIEWSEENTKQLNMVIEALNTASNLEERLPEQRLVIKVNTSPSAGYVRYYNETGKKPIMYLNYVFSKAELKFSMLEKLLTTMHKALIKAMDLAMGQEILVYSPIVSMTKIQKTPLPERKALPIRWITWMTYLEDPRIQFHYDKTLPELKHIPDVYTSSQSPVKHPSQYEGVFYTDGSAIKSPDPTKSNNAGMGIVHATYKPEYQVLNQWSIPLGNHTAQMAEIAAVEFACKKALKIPGPVLVITDSFYVAESANKELPYWKSNGFVNNKKKPLKHISKWKSIAECLSMKPDITIQHEKGISLQIPVFILKGNALADKLATQGSYVVN

SEQ ID NO: 154 - protein, 585 aa, Synthetic construct
LTAAIDILAPQQCAEPITWKSDEPVWVDQWPLTNDKLAAAQQLVQEQLEAGHITESSSPWNTPIFVIKKKSGKWRLLQDLRAVNATMVLMGALQPGLPSPVAIPQGYLKIIIDLKDCFFSIPLHPSDQKRFAFSLPSTNFKEPMQRFQWKVLPQGMANSPTLCQKYVATAIHKVRHAWKQMYIIHYMDDILIAGKDGQQVLQCFDQLKQELTAAGLHIAPEKVQLQDPYTYLGFELNGPKITNQKAVIRKDKLQTLNDFQKLLGDINWLRPYLKLTTGDLKPLFDTLKGDSDPNSHRSLSKEALASLEKVETAIAEQFVTHINYSLPLIFLIFNTALTPTGLFWQDNPIMWIHLPASPKKVLLPYYDAIADLIILGRDHSKKYFGIEPSTIIQPYSKSQIDWLMQNTEMWPIACASFVGILDNHYPPNKLIQFCKLHTFVFPQIISKTPLNNALLVFTDGSSTGMAAYTLTDTTIKFQTNLNSAQLVELQALIAVLSAFPNQPLNIYTDSAYLAHSIPLLETVAQIKHISETAKLFLQCQQLIYNRSIPFYIGHVRAHSGLPGPIAQGNQRADLATKIVASNINT

SEQ ID NO: 155 - protein, 577 aa, Synthetic construct
MIGAIESNLFADQISWKSDQPVWLNQWPLKQEKLQALQQLVTEQLQLGHLEESNSPWNTPVFVIKKKSGKWRLLQDLRAVNATMHDMGALQPGLPSPVAVPKGWEIIIIDLQDCFFNIKLHPEDCKRFAFSVPSPNFKRPYQRFQWKVLPQGMKNSPTLCQKFVDKAILTVRDKYQDSYIVHYMDDILLAHPSRSIVDEILTSMIQALNKHGLVVSTEKIQKYDNLKYLGTHIQGDAVSYQKLQIRTDKLRTLNDFQKLLGNINWIRPFLKLTTGELKPLFEILNGDSNPISIRKLTPEACKALQLVNERLSIARVKRLDLSRPWSLCILKTEYTPTACLWQNGVLEWIHLPHISPKVITPYDIFCTQLIIKGRHRSKELFSKDPDYIVVPYTKVQFDLLLQEKEDWPISLLGFLGEVHFHLPKDPLLTFTLQTAIIFPHMTSTTPLEKGIVIFTDGSANGRSVTYIQGREPIIKENTQNTAQQAEIVAVITAFEEVSQSFNLYTDSKYVTGLFPEIETATLSPRTKIYTELRHLQRLIHKRQEKFYIGHIRGHTGLPGPLAQGNAYADSLTRILTA

SEQ ID NO: 156 - protein, 751 aa, Synthetic construct
MNPLQLLQPLPAEIKGTKLLAHWDSGATITCIPESFLEDEQPIKKTLIKTIHGEKQQNVYYVTFKVKGRKVEAEVIASPYEYILLSPTDVPWLTQQPLQLTILVPLQEYQEKILSKTALPEDQKQQLKTLFVKYDNLWQHWENQVGHRKIRPHNIATGDYPPRPQKQYPINPKAKPSIQIVIDDLLKQGVLTPQNSTMNTPVYPVPKPDGRWRMVLDYREVNKTIPLTAAQNQHSAGILATIVRQKYKTTLDLANGFWAHPITPESYWLTAFTWQGKQYCWTRLPQGFLNSPALFNADVVDLLKEIPNVQVYVDDIYLSHDDPKEHVQQLEKVFQILLQAGYVVSLKKSEIGQKTVEFLGFNITKEGRGLTDTFKTKLLNITPPKDLKQLQSILGKLNFARNFIPNFAELVQPLYNLIASAKPKYIEWSEENTKQLNMVIEALNTASNLEERLPEQRLVIKVNTSPSAGYVRYYNETGKKPIMYLNYVFSKAELKFSMLEKLLTTMHKALIKAMDLAMGQEILVYSPIVSMTKIQKTPLPERKALPIRWITWMTYLEDPRIQFHYDKTLPELKHIPDVYTSSQSPVKHPSQYEGVFYTDGSAIKSPDPTKSNNAGMGIVHATYKPEYQVLNQWSIPLGNHTAQMAEIAAVEFACKKALKIPGPVLVITDSFYVAESANKELPYWKSNGFVNNKKKPLKHISKWKSIAECLSMKPDITIQHEKGISLQIPVFILKGNALADKLATQGSYVVN

SEQ ID NO: 157 - protein, 751 aa, Synthetic construct
MNPLQLLQPLPAEIKGTKLLAHWDSGATITCIPESFLEDEQPIKKTLIKTIHGEKQQNVYYVTFKVKGRKVEAEVIASPYEYILLSPTDVPWLTQQPLQLTILVPLQEYQEKILSKTALPEDQKQQLKTLFVKYDNLWQHWENQVGHRKIRPHNIATGDYPPRPQKQYPINPKAKPSIQIVIDDLLKQGVLTPQNSTMNTPVYPVPKPDGRWRMVLDYREVNKTIPLTAAQNQHSAGILATIVRQKYKTTLDLANGFWAHPITPESYWLTAFTWQGKQYCWTRLPQGFLNSPALFNADVVDLLKEIPNVQVYVDDIYLSHDDPKEHVQQLEKVFQILLQAGYVVSLKKSEIGQKTVEFLGFNITKEGRGLTDTFKTKLLNITPPKDLKQLQSILGKLNFARNFIPNFAELVQPLYNLIASAKGPYIEWSEENTKQLNMVIEALNTASNLEERLPEQRLVIKVNTSPSAGYVRYYNETGKKPIMYLNYVFSKAELKFSMLEKLLTTMHKALIKAMDLAMGQEILVYSPIVSMTKIQKTPLPERKALPIRWITWMTYLEDPRIQFHYDKTLPELKHIPDVYTSSQSPVKHPSQYEGVFYTDGSAIKSPDPTKSNNAGMGIVHATYKPEYQVLNQWSIPLGNHTAQMAEIAAVEFACKKALKIPGPVLVITDSFYVAESANKELPYWKSNGFVNNKKKPLKHISKWKSIAECLSMKPDITIQHEKGISLQIPVFILKGNALADKLATQGSYVVN

SEQ ID NO: 158 - protein, 585 aa, Synthetic construct
LTAAIDILAPQQCAEPITWKSDEPVWVDQWPLTNDKLAAAQQLVQEQLEAGHITESSSPWNTPIFVIKKKSGKWRLLQDLRAVNATMVLMGALQPGLPSPVAIPQGYLKIIIDLKDCFFSIPLHPSDQKRFAFSLPSTNFKEPMQRFQWKVLPQGMANSPTLCQKYVATAIHKVRHAWKQMYIIHYMDDILIAGKDGQQVLQCFDQLKQELTAAGLHIAPEKVQLQDPYTYLGFELNGPKITNQKAVIRKDKLQTLNDFQKLLGKINWLRPFLKLTTGDLKPLFDTLKGDSDPNSHRSLSKEALASLEKVETAIAEQFVTHINYSLPLIFLIFNTALTPTGLFWQDNPIMWIHLPASPKKVLLPYYDAIADLIILGRDHSKKYFGIEPSTIIQPYSKSQIDWLMQNTEMWPIACASFVGILDNHYPPNKLIQFCKLHTFVFPQIISKTPLNNALLVFTDGSSTGMAAYTLTDTTIKFQTNLNSAQLVELQALIAVLSAFPNQPLNIYTDSAYLAHSIPLLETVAQIKHISETAKLFLQCQQLIYNRSIPFYIGHVRAHSGLPGPIAQGNQRADLATKIVASNINT

SEQ ID NO: 159 - protein, 585 aa, Synthetic construct
LTAAIDILAPQQCAEPITWKSDEPVWVDQWPLTNDKLAAAQQLVQEQLEAGHITESSSPWNTPIFVIKKKSGKWRLLQDLRAVNATMVLMGALQPGLPSPVAIPQGYLKIIIDLKDCFFSIPLHPSDQKRFAFSLPSTNFKEPMQRFQWKVLPQGMANSPTLCNKYVATAIHKVRHAWKQMYIIHYMDDILIAGKDGQQVLQCFDQLKQELTAAGLHIAPEKVQLQDPYTYLGFELNGPKITNQKAVIRKDKLQTLNDFQKLLGKINWLRPFLKLTTGDLKPLFDTLKGDSDPNSHRSLSKEALASLEKVETAIAEQFVTHINYSLPLIFLIFNTALTPTGLFWQDNPIMWIHLPASPKKVLLPYYDAIADLIILGRDHSKKYFGIEPSTIIQPYSKSQIDWLMQNTEMWPIACASFVGILDNHYPPNKLIQFCKLHTFVFPQIISKTPLNNALLVFTDGSSTGMAAYTLTDTTIKFQTNLNSAQLVELQALIAVLSAFPNQPLNIYTDSAYLAHSIPLLETVAQIKHISETAKLFLQCQQLIYNRSIPFYIGHVRAHSGLPGPIAQGNQRADLATKIVASNINT

SEQ ID NO: 160 - protein, 585 aa, Synthetic construct
LTAAIDILAPQQCAEPITWKSDEPVWVDQWPLTNDKLAAAQQLVQEQLEAGHITESSSPWNTPIFVIKKKSGKWRLLQDLRAVNATMVLMGALQPGLPSPVAIPQGYLKIIIDLKDCFFSIPLHPSDQKRFAFSLPSTNFKEPMQRFQWKVLPQGMANSPTLCQKYVATAIHKVRHAWKQMYIIHYMDDILIAGKDGQQVLQCFDQLKQELTAAGLHIAPEKVQLQDPYTYLGFELNGPKITNQKAVIRKDKLQTLNDFQKLLGKINWLRPFLKLTTGDLKPLFDTLKPDSDPNSHRSLSKEALASLEKVETAIAEQFVTHINYSLPLIFLIFNTALTPTGLFWQDNPIMWIHLPASPKKVLLPYYDAIADLIILGRDHSKKYFGIEPSTIIQPYSKSQIDWLMQNTEMWPIACASFVGILDNHYPPNKLIQFCKLHTFVFPQIISKTPLNNALLVFTDGSSTGMAAYTLTDTTIKFQTNLNSAQLVELQALIAVLSAFPNQPLNIYTDSAYLAHSIPLLETVAQIKHISETAKLFLQCQQLIYNRSIPFYIGHVRAHSGLPGPIAQGNQRADLATKIVASNINT

SEQ ID NO: 161 - protein, 585 aa, Synthetic construct
LTAAIDILAPQQCAEPITWKSDEPVWVDQWPLTNDKLAAAQQLVQEQLEAGHITESSSPWNTPIFVIKKKSGKWRLLQDLRAVNATMVLMGALQPGLPSPVAIPQGYLKIIIDLKDCFFSIPLHPSDQKRFAFSLPSTNFKEPMQRFQWKVLPQGMANSPTLCQKYVATAIHKVRHAWKQMYIIHYMDDILIAGKDGQQVLQCFDQLKQELTAAGLHIAPEKVQLQDPYTYLGFELNGPKITNQKAVIRKDKLQTLNDFQKLLGKINWLRPFLKLTTGDLKPLFDTLKGDPDPNSHRSLSKEALASLEKVETAIAEQFVTHINYSLPLIFLIFNTALTPTGLFWQDNPIMWIHLPASPKKVLLPYYDAIADLIILGRDHSKKYFGIEPSTIIQPYSKSQIDWLMQNTEMWPIACASFVGILDNHYPPNKLIQFCKLHTFVFPQIISKTPLNNALLVFTDGSSTGMAAYTLTDTTIKFQTNLNSAQLVELQALIAVLSAFPNQPLNIYTDSAYLAHSIPLLETVAQIKHISETAKLFLQCQQLIYNRSIPFYIGHVRAHSGLPGPIAQGNQRADLATKIVASNINT

SEQ ID NO: 162 - protein, 585 aa, Synthetic construct
LTAAIDILAPQQCAEPITWKSDEPVWVDQWPLTNDKLAAAQQLVQEQLEAGHITESSSPWNTPIFVIKKKSGKWRLLQDLRAVNATMVLMGALQPGLPSPVAIPQGYLKIIIDLKDCFFSIPLHPSDQKRFAFSLPSTNFKEPMQRFQWKVLPQGMANSPTLCQKYVATAIHKVRHAWKQMYIIHYMDDILIAGKDGQQVLQCFDQLKQELTAAGLHIAPEKVQLQDPYTYLGFELNGPKITNQKAVIRKDKLQTLNDFQKLLGKINWLRPFLKLTTGDLKPLFDTLKGDSDPNSHRSLSKEALASLEKVETAIAEQFVTHINYSLPLIFLIFNTALTPTGLFWQDNPIMWIHLPASPKKVLLPYYDAIADLIILGRDHSKKYFGIEPSTIIQPYSKSQIDWLMQNTEMWPIACASFVGILDNHYPPNKLIQFCKLHTFVFPQIISKTPLNNALLVFTDGSSTGMAAYTLTDTTIKFQTNLNSAQLVELQALIAVLSAFPNQPLNIYTDSAYLAHSIPLLETVAQIKHISEWAKLFLQCQQLIYNRSIPFYIGHVRAHSGLPGPIAQGNQRADLATKIVASNINT

SEQ ID NO: 163 - protein, 585 aa, Synthetic construct
LTAAIDILAPQQCAEPITWKSDEPVWVDQWPLTNDKLAAAQQLVQEQLEAGHITESSSPWNTPIFVIKKKSGKWRLLQDLRAVNATMVLMGALQPGLPSPVAIPQGYLKIIIDLKDCFFSIPLHPSDQKRFAFSLPSTNFKEPMQRFQWKVLPQGMANSPTLCQKYVATAIHKVRHAWKQMYIIHYMDDILIAGKDGQQVLQCFDQLKQELTAAGLHIAPEKVQLQDPYTYLGFELNGPKITNQKAVIRKDKLQTLNDFQKLLGKINWLRPFLKLTTGDLKPLFDTLKGDSDPNSHRSLSKEALASLEKVETAIAEQFVTHINYSLPLIFLIFNTALTPTGLFWQDNPIMWIHLPASPKKVLLPYYDAIADLIILGRDHSKKYFGIEPSTIIQPYSKSQIDWLMQNTEMWPIACASFVGILDNHYPPNKLIQFCKLHTFVFPQIISKTPLNNALLVFTDGSSTGMAAYTLTDTTIKFQTNLNSAQLVELQALIAVLSAFPNQPLNIYTDSAYLAHSIPLLETVAQIKHISETAKWFLQCQQLIYNRSIPFYIGHVRAHSGLPGPIAQGNQRADLATKIVASNINT

SEQ ID NO: 164 - protein, 585 aa, Synthetic construct
LTAAIDILAPQQCAEPITWKSDEPVWVDQWPLTNDKLAAAQQLVQEQLEAGHITESSSPWNTPIFVIKKKSGKWRLLQDLRAVNATMVLMGALQPGLPSPVAIPQGYLKIIIDLKDCFFSIPLHPSDQKRFAFSLPSTNFKEPMQRFQWKVLPQGMANSPTLCNKYVATAIHKVRHAWKQMYIIHYMDDILIAGKDGQQVLQCFDQLKQELTAAGLHIAPEKVQLQDPYTYLGFELNGPKITNQKAVIRKDKLQTLNDFQKLLGKINWLRPFLKLTTGDLKPLFDTLKPDSDPNSHRSLSKEALASLEKVETAIAEQFVTHINYSLPLIFLIFNTALTPTGLFWQDNPIMWIHLPASPKKVLLPYYDAIADLIILGRDHSKKYFGIEPSTIIQPYSKSQIDWLMQNTEMWPIACASFVGILDNHYPPNKLIQFCKLHTFVFPQIISKTPLNNALLVFTDGSSTGMAAYTLTDTTIKFQTNLNSAQLVELQALIAVLSAFPNQPLNIYTDSAYLAHSIPLLETVAQIKHISETAKLFLQCQQLIYNRSIPFYIGHVRAHSGLPGPIAQGNQRADLATKIVASNINT

SEQ ID NO: 165 - protein, 585 aa, Synthetic construct
LTAAIDILAPQQCAEPITWKSDEPVWVDQWPLTNDKLAAAQQLVQEQLEAGHITESSSPWNTPIFVIKKKSGKWRLLQDLRAVNATMVLMGALQPGLPSPVAIPQGYLKIIIDLKDCFFSIPLHPSDQKRFAFSLPSTNFKEPMQRFQWKVLPQGMANSPTLCNKYVATAIHKVRHAWKQMYIIHYMDDILIAGKDGQQVLQCFDQLKQELTAAGLHIAPEKVQLQDPYTYLGFELNGPKITNQKAVIRKDKLQTLNDFQKLLGKINWLRPFLKLTTGDLKPLFDTLKGDPDPNSHRSLSKEALASLEKVETAIAEQFVTHINYSLPLIFLIFNTALTPTGLFWQDNPIMWIHLPASPKKVLLPYYDAIADLIILGRDHSKKYFGIEPSTIIQPYSKSQIDWLMQNTEMWPIACASFVGILDNHYPPNKLIQFCKLHTFVFPQIISKTPLNNALLVFTDGSSTGMAAYTLTDTTIKFQTNLNSAQLVELQALIAVLSAFPNQPLNIYTDSAYLAHSIPLLETVAQIKHISETAKLFLQCQQLIYNRSIPFYIGHVRAHSGLPGPIAQGNQRADLATKIVASNINT

SEQ ID NO: 166 - protein, 585 aa, Synthetic construct
LTAAIDILAPQQCAEPITWKSDEPVWVDQWPLTNDKLAAAQQLVQEQLEAGHITESSSPWNTPIFVIKKKSGKWRLLQDLRAVNATMVLMGALQPGLPSPVAIPQGYLKIIIDLKDCFFSIPLHPSDQKRFAFSLPSTNFKEPMQRFQWKVLPQGMANSPTLCNKYVATAIHKVRHAWKQMYIIHYMDDILIAGKDGQQVLQCFDQLKQELTAAGLHIAPEKVQLQDPYTYLGFELNGPKITNQKAVIRKDKLQTLNDFQKLLGKINWLRPFLKLTTGDLKPLFDTLKGDSDPNSHRSLSKEALASLEKVETAIAEQFVTHINYSLPLIFLIFNTALTPTGLFWQDNPIMWIHLPASPKKVLLPYYDAIADLIILGRDHSKKYFGIEPSTIIQPYSKSQIDWLMQNTEMWPIACASFVGILDNHYPPNKLIQFCKLHTFVFPQIISKTPLNNALLVFTDGSSTGMAAYTLTDTTIKFQTNLNSAQLVELQALIAVLSAFPNQPLNIYTDSAYLAHSIPLLETVAQIKHISEWAKLFLQCQQLIYNRSIPFYIGHVRAHSGLPGPIAQGNQRADLATKIVASNINT

SEQ ID NO: 167 - protein, 585 aa, Synthetic construct
LTAAIDILAPQQCAEPITWKSDEPVWVDQWPLTNDKLAAAQQLVQEQLEAGHITESSSPWNTPIFVIKKKSGKWRLLQDLRAVNATMVLMGALQPGLPSPVAIPQGYLKIIIDLKDCFFSIPLHPSDQKRFAFSLPSTNFKEPMQRFQWKVLPQGMANSPTLCNKYVATAIHKVRHAWKQMYIIHYMDDILIAGKDGQQVLQCFDQLKQELTAAGLHIAPEKVQLQDPYTYLGFELNGPKITNQKAVIRKDKLQTLNDFQKLLGKINWLRPFLKLTTGDLKPLFDTLKGDSDPNSHRSLSKEALASLEKVETAIAEQFVTHINYSLPLIFLIFNTALTPTGLFWQDNPIMWIHLPASPKKVLLPYYDAIADLIILGRDHSKKYFGIEPSTIIQPYSKSQIDWLMQNTEMWPIACASFVGILDNHYPPNKLIQFCKLHTFVFPQIISKTPLNNALLVFTDGSSTGMAAYTLTDTTIKFQTNLNSAQLVELQALIAVLSAFPNQPLNIYTDSAYLAHSIPLLETVAQIKHISETAKWFLQCQQLIYNRSIPFYIGHVRAHSGLPGPIAQGNQRADLATKIVASNINT

SEQ ID NO: 168 - protein, 585 aa, Synthetic construct
LTAAIDILAPQQCAEPITWKSDEPVWVDQWPLTNDKLAAAQQLVQEQLEAGHITESSSPWNTPIFVIKKKSGKWRLLQDLRAVNATMVLMGALQPGLPSPVAIPQGYLKIIIDLKDCFFSIPLHPSDQKRFAFSLPSTNFKEPMQRFQWKVLPQGMANSPTLCNKYVATAIHKVRHAWKQMYIIHYMDDILIAGKDGQQVLQCFDQLKQELTAAGLHIAPEKVQLQDPYTYLGFELNGPKITNQKAVIRKDKLQTLNDFQKLLGKINWLRPFLKLTTGDLKPLFDTLKPDSDPNSHRSLSKEALASLEKVETAIAEQFVTHINYSLPLIFLIFNTALTPTGLFWQDNPIMWIHLPASPKKVLLPYYDAIADLIILGRDHSKKYFGIEPSTIIQPYSKSQIDWLMQNTEMWPIACASFVGILDNHYPPNKLIQFCKLHTFVFPQIISKTPLNNALLVFTDGSSTGMAAYTLTDTTIKFQTNLNSAQLVELQALIAVLSAFPNQPLNIYTDSAYLAHSIPLLETVAQIKHISEWAKLFLQCQQLIYNRSIPFYIGHVRAHSGLPGPIAQGNQRADLATKIVASNINT

SEQ ID NO: 169 - protein, 585 aa, Synthetic construct
LTAAIDILAPQQCAEPITWKSDEPVWVDQWPLTNDKLAAAQQLVQEQLEAGHITESSSPWNTPIFVIKKKSGKWRLLQDLRAVNATMVLMGALQPGLPSPVAIPQGYLKIIIDLKDCFFSIPLHPSDQKRFAFSLPSTNFKEPMQRFQWKVLPQGMANSPTLCNKYVATAIHKVRHAWKQMYIIHYMDDILIAGKDGQQVLQCFDQLKQELTAAGLHIAPEKVQLQDPYTYLGFELNGPKITNQKAVIRKDKLQTLNDFQKLLGKINWLRPFLKLTTGDLKPLFDTLKPDSDPNSHRSLSKEALASLEKVETAIAEQFVTHINYSLPLIFLIFNTALTPTGLFWQDNPIMWIHLPASPKKVLLPYYDAIADLIILGRDHSKKYFGIEPSTIIQPYSKSQIDWLMQNTEMWPIACASFVGILDNHYPPNKLIQFCKLHTFVFPQIISKTPLNNALLVFTDGSSTGMAAYTLTDTTIKFQTNLNSAQLVELQALIAVLSAFPNQPLNIYTDSAYLAHSIPLLETVAQIKHISETAKWFLQCQQLIYNRSIPFYIGHVRAHSGLPGPIAQGNQRADLATKIVASNINT

SEQ ID NO: 170 - protein, 585 aa, Synthetic construct
LTAAIDILAPQQCAEPITWKSDEPVWVDQWPLTNDKLAAAQQLVQEQLEAGHITESSSPWNTPIFVIKKKSGKWRLLQDLRAVNATMVLMGALQPGLPSPVAIPQGYLKIIIDLKDCFFSIPLHPSDQKRFAFSLPSTNFKEPMQRFQWKVLPQGMANSPTLCNKYVATAIHKVRHAWKQMYIIHYMDDILIAGKDGQQVLQCFDQLKQELTAAGLHIAPEKVQLQDPYTYLGFELNGPKITNQKAVIRKDKLQTLNDFQKLLGKINWLRPFLKLTTGDLKPLFDTLKGDPDPNSHRSLSKEALASLEKVETAIAEQFVTHINYSLPLIFLIFNTALTPTGLFWQDNPIMWIHLPASPKKVLLPYYDAIADLIILGRDHSKKYFGIEPSTIIQPYSKSQIDWLMQNTEMWPIACASFVGILDNHYPPNKLIQFCKLHTFVFPQIISKTPLNNALLVFTDGSSTGMAAYTLTDTTIKFQTNLNSAQLVELQALIAVLSAFPNQPLNIYTDSAYLAHSIPLLETVAQIKHISEWAKLFLQCQQLIYNRSIPFYIGHVRAHSGLPGPIAQGNQRADLATKIVASNINT

SEQ ID NO: 171 - protein, 585 aa, Synthetic construct
LTAAIDILAPQQCAEPITWKSDEPVWVDQWPLTNDKLAAAQQLVQEQLEAGHITESSSPWNTPIFVIKKKSGKWRLLQDLRAVNATMVLMGALQPGLPSPVAIPQGYLKIIIDLKDCFFSIPLHPSDQKRFAFSLPSTNFKEPMQRFQWKVLPQGMANSPTLCNKYVATAIHKVRHAWKQMYIIHYMDDILIAGKDGQQVLQCFDQLKQELTAAGLHIAPEKVQLQDPYTYLGFELNGPKITNQKAVIRKDKLQTLNDFQKLLGKINWLRPFLKLTTGDLKPLFDTLKGDPDPNSHRSLSKEALASLEKVETAIAEQFVTHINYSLPLIFLIFNTALTPTGLFWQDNPIMWIHLPASPKKVLLPYYDAIADLIILGRDHSKKYFGIEPSTIIQPYSKSQIDWLMQNTEMWPIACASFVGILDNHYPPNKLIQFCKLHTFVFPQIISKTPLNNALLVFTDGSSTGMAAYTLTDTTIKFQTNLNSAQLVELQALIAVLSAFPNQPLNIYTDSAYLAHSIPLLETVAQIKHISETAKWFLQCQQLIYNRSIPFYIGHVRAHSGLPGPIAQGNQRADLATKIVASNINT

SEQ ID NO: 172 - protein, 577 aa, Synthetic construct
MIGAIESNLFADQISWKSDQPVWLNQWPLKQEKLQALQQLVTEQLQLGHLEESNSPWNTPVFVIKKKSGKWRLLQDLRAVNATMHDMGALQPGLPSPVAVPKGWEIIIIDLQDCFFNIKLHPEDCKRFAFSVPSPNFKRPYQRFQWKVLPQGMKNSPTLCNKFVDKAILTVRDKYQDSYIVHYMDDILLAHPSRSIVDEILTSMIQALNKHGLVVSTEKIQKYDNLKYLGTHIQGDAVSYQKLQIRTDKLRTLNDFQKLLGKINWIRPFLKLTTGELKPLFEILNGDSNPISIRKLTPEACKALQLVNERLSIARVKRLDLSRPWSLCILKTEYTPTACLWQNGVLEWIHLPHISPKVITPYDIFCTQLIIKGRHRSKELFSKDPDYIVVPYTKVQFDLLLQEKEDWPISLLGFLGEVHFHLPKDPLLTFTLQTAIIFPHMTSTTPLEKGIVIFTDGSANGRSVTYIQGREPIIKENTQNTAQQAEIVAVITAFEEVSQSFNLYTDSKYVTGLFPEIETATLSPRTKIYTELRHLQRLIHKRQEKFYIGHIRGHTGLPGPLAQGNAYADSLTRILTA

SEQ ID NO: 173 - protein, 577 aa, Synthetic construct
MIGAIESNLFADQISWKSDQPVWLNQWPLKQEKLQALQQLVTEQLQLGHLEESNSPWNTPVFVIKKKSGKWRLLQDLRAVNATMHDMGALQPGLPSPVAVPKGWEIIIIDLQDCFFNIKLHPEDCKRFAFSVPSPNFKRPYQRFQWKVLPQGMKNSPTLCNKFVDKAILTVRDKYQDSYIVHYMDDILLAHPSRSIVDEILTSMIQALNKHGLVVSTEKIQKYDNLKYLGTHIQGDAVSYQKLQIRTDKLRTLNDFQKLLGKINWIRPFLKLTTGELKPLFEILNGDSNPISIRKLTPEACKALQLVNERLSIARVKRLDLSRPWSLCILKTEYTPTACLWQNGVLEWIHLPHISPKVITPYDIFCTQLIIKGRHRSKELFSKDPDYIVVPYTKVQFDLLLQEKEDWPISLLGFLGEVHFHLPKDPLLTFTLQTAIIFPHMTSTTPLEKGIVIFTDGSANGRSVTYIQGREPIIKENTQNTAQQAEIVAVITAFEEVSQSFNLYTDSKYVTGLFPEIETATLSPRTKWYTELRHLQRLIHKRQEKFYIGHIRGHTGLPGPLAQGNAYADSLTRILTA

SEQ ID NO: 174 - protein, 496 aa, Synthetic construct
TLNIEDEHRLHETSKEPDVSLGSTWLSDFPQAWAETGGMGLAVRQAPLIIPLKATSTPVSIKQYPMSQEARLGIKPHIQRLLDQGILVPCQSPWNTPLLPVKKPGTNDYRPVQDLREVNKRVEDIHPTVPNPYNLLSGLPPSHQWYTVLDLKDAFFCLRLHPTSQPLFAFEWRDPEMGISGQLTWTRLPQGFKNSPTLFNEALHRDLADFRIQHPDLILLQYVDDLLLAATSELDCQQGTRALLQTLGNLGYRASAKKAQICQKQVKYLGYLLKEGQRWLTEARKETVMGQPTPKTPRQLREFLGKAGFCRLFIPGFAEMAAPLYPLTKPGTLFNWGPDQQKAYQEIKQALLTAPALGLPDLTKPFELFVDEKQGYAKGVLTQKLGPWRRPVAYLSKKLDPVAAGWPPCLRMVAAIAVLTKDAGKLTMGQPLVILAPHAVEALVKQPPDRWLSNARMTHYQALLLDTDRVQFGPVVALNPATLLPLPEEGLQHNCL

SEQ ID NO: 175 - protein, 496 aa, Synthetic construct
TLNIEDEYRLHETSKEPDVSLGSTWLSDFPQAWAETGGMGLAVRQAPLIILLKATSTPVSIKQYPMRQKARLGIKPHIQRLLDQGILVPCQSPWNTPLLPVKKPGTNDYRPVQDLREVNKRVEDIHPTVPNPYNLLSGLPPSHQWYTVLDLKDAFFCLRLHPTSQPLFAFEWRDPEMGISGQLTWTRLPQGFKNSPALFDEALRRDLADFRIQHPDLILLQYVDDLLLAATSELDCQQGTRALLQTLGDLGYRASAKKAQICQKQVKYLGYLLKEGQRWLTEARKETVMGQPTPKTPRQLRKFLGTAGNCRLFIPGFAEMAAPLYPLTKPGTLFNWGPDQQKAYQEIKQALLTAPALGLPDLTKPFELFVDEKQGYAKGVLTQKLGPWRRPVAYLSKKLDPVAAGWPPCLRMVAAIAVLTKDAGKLTMGQPLVIGAPHAVEALVKQPPDRWLSKARMTHYQALLLDTDRVQFGPVVALNPATLLPLPEEGLQHNCL

SEQ ID NO: 176 - protein, 496 aa, Synthetic construct
TVSLQDEHRLFDIPVTTSLPDVWLQDFPQAWAETGGLGRAKCQAPIIIDLKPTAVPVSIKQYPMSLEAHMGIRQHIIKFLELGVLRPCRSPWNTPLLPVKKPGTQDYRPVQDLREINKRTVDIHPTVPNPYNLLSTLKPDYSWYTVLDLKDAFFCLPLAPQSQELFAFEWKDPERGISGQLTWTRLPQGFKNSPTLFDEALHRDLTDFRTQHPEVTLLQYVDDLLLAAPTKKACTQGTRHLLQELGEKGYRASAKKAQICQTKVTYLGYILSEGKRWLTPGRIETVARIPPPRNPREVREFLGTAGFCRLWIPGFAELAAPLYALTKESTPFTWQTEHQLAFEALKKALLSAPALGLPDTSKPFTLFLDERQGIAKGVLTQKLGPWKRPVAYLSKKLDPVAAGWPPCLRIMAATAMLVKDSAKLTLGQPLTVITPHTLEAIVRQPPDRWITNARLTHYQALLLDTDRVQFGPPVTLNPATLLPVPENQPSPHDCRQ

SEQ ID NO: 177 - protein, 496 aa, Synthetic construct
LVLNLEEEYRLNEKPVPPSIDPSWLQLFPMVWAEKAGMGLANQVPPVVVELKSDASPVAVRQYPMSKEAREGIRPHIQRFLDLGILVPCQSPWNTPLLPVKKPGTNDYRPVQDLREVNKRVQDIHPTVPNPYNLLSSLPPSHTWYSVLDLKDAFFCLKLHPNSQPLFAFEWRDPEKGNTGQLTWTRLPQGFKNSPTLFDEALHRDLASFRALNPQVVMLQYVDDLLVAAPTYRDCKEGTRRLLQELSKLGYRVSAKKAQLCREEVTYLGYLLKGGKRWLTPARKATVMKIPTPTTPRQVREFLGTAGFCRLWIPGFASLAAPLYPLTREKVPFTWTEAHQEAFGRIKEALLSAPALALPDLTKPFALYVDEKEGVARGVLTQTLGPWRRPVAYLSKKLDPVASGWPTCLKAIAAVALLLKDADKLTLGQNVLVIAPHNLESIVRQPPDRWMTNARMTHYQSLLLNERVSFAPPAILNPATLLPVESDDTPIHICSE

SEQ ID NO: 178 - protein, 496 aa, Synthetic construct
TLNIEDEYRLHETSKGPDVPLGSTWLSDFPQAWAETGGMGLAVRQAPLIIPLRAASTPVSIKQYPMSREARLGIKPHIQRLLDQGILVPCQSPWNTPLLPVKKPGTNDYRPVQDLREVNKRVEDIHPTVPNPYNLLSGLPPSHQWYTVLDLKDAFFCLRLHPTSQSLFAFEWRDPEMGISGQLTWTRLPQGFKNSPTLFDEALHRDLADFRIQHPDLILLQYVDDLLLAATSELDCQQGTRALLQTLGDLGYRASAKKAQICQKQVKYLGYLLKEGQRWLTEARKETVMGQPTPKTPRQLREFLGTAGFCRLWIPGFAEMAAPLYPLTKTGTLFKWGPDQQKAYQEIKQALLTAPALGLPDLTKPFELFVDEKQGYAKGVLTQKLGPWRRPVAYLSKKLDPVAAGWPPCLRMVAAIAVLTKDAGKLTMGQPLVILAPHAVEALVKQPPDRWLSNARMTHYQALLLDTDRVQFGPIVTLNPATLLPLPEEGLQHDCL

SEQ ID NO: 179 - protein, 499 aa, Synthetic construct
TAPLEEEYRLFLEAPIQNVTLLEQWKREIPKVWAEINPPGLASTQAPIHVQLLSTALPVRVRQYPITLEAKRSLRETIRKFRAAGILRPVHSPWNTPLLPVRKSGTSEYRMVQDLREVNKRVETIHPTVPNPYTLLSLLPPDRIWYSVLDLKDAFFCIPLAPESQLIFAFEWADAEEGESGQLTWTRLPQGFKNSPTLFDEALNRDLQGFRLDHPSVSLLQYVDDLLIAADTQAACLSATRDLLMTLAELGYRVSGKKAQLCQEEVTYLGFKIHKGSRSLSNSRTQAILQIPVPKTKRQVREFLGTIGYCRLWIPGFAELAQPLYAATRGGNDPLVWGEKEEEAFQSLKLALTQPPALALPSLDKPFQLFVEETSGAAKGVLTQALGPWKRPVAYLSKRLDPVAAGWPRCLRAIAAAALLTREASKLTFGQDIEITSSHNLESLLRSPPDKWLTNARITQYQVLLLDPPRVRFKQTAALNPATLLPETDDTLPIHHCLD

SEQ ID NO: 180 - protein, 428 aa, Synthetic construct
PISPIETVPVKLKPGMDGPKVKQWPLTEEKIKALVEICTEMEKEGKISKIGPENPYNTPVFAIKKKDSTKWRKLVDFRELNKRTQDFWEVQLGIPHPAGLKKKKSVTVLDVGDAYFSVPLDEDFRKYTAFTIPSINNETPGIRYQYNVLPQGWKGSPAIFQSSMTKILEPFRKQNPDIVIYQYMDDLYVGSDLEIGQHRTKIEELRQHLLRWGLTTPDKKHQKEPPFLWMGYELHPDKWTVQPIVLPEKDSWTVNDIQKLVGKLNWASQIYPGIKVRQLCKLLRGTKALTEVIPLTEEAELELAENREILKEPVHGVYYDPSKDLIAEIQKQGQGQWTYQIYQEPFKNLKTGKYARMRGAHTNDVKQLTEAVQKITTESIVIWGKTPKFKLPIQKETWETWWTEYWQATWIPEWEFVNTPPLVKLWYQ

SEQ ID NO: 181 - protein, 574 aa, Synthetic construct
MNPLQLLQPLPAEIKGTKLLAHWDSGATITCIPESFLEDEQPIKKTLIKTIHGEKQQNVYYVTFKVKGRKVEAEVIASPYEYILLSPTDVPWLTQQPLQLTILVPLQEYQEKILSKTALPEDQKQQLKTLFVKYDNLWQHWENQVGHRKIRPHNIATGDYPPRPQKQYPINPKAKPSIQIVIDDLLKQGVLTPQNSTMNTPVYPVPKPDGRWRMVLDYREVNKTIPLTAAQNQHSAGILATIVRQKYKTTLDLANGFWAHPITPESYWLTAFTWQGKQYCWTRLPQGFLNSPALFTADVVDLLKEIPNVQVYVDDIYLSHDDPKEHVQQLEKVFQILLQAGYVVSLKKSEIGQKTVEFLGFNITKEGRGLTDTFKTKLLNITPPKDLKQLQSILGLLNFARNFIPNFAELVQPLYNLIASAKGKYIEWSEENTKQLNMVIEALNTASNLEERLPEQRLVIKVNTSPSAGYVRYYNETGKKPIMYLNYVFSKAELKFSMLEKLLTTMHKALIKAMDLAMGQEILVYSPIVSMTKIQKTPLPERKALPIRWITWMTYLEDPRIQFHYDKTLPELKH

SEQ ID NO: 182 - protein, 439 aa, Synthetic construct
LTAAIDILAPQQCAEPITWKSDEPVWVDQWPLTNDKLAAAQQLVQEQLEAGHITESSSPWNTPIFVIKKKSGKWRLLQDLRAVNATMVLMGALQPGLPSPVAIPQGYLKIIIDLKDCFFSIPLHPSDQKRFAFSLPSTNFKEPMQRFQWKVLPQGMANSPTLCQKYVATAIHKVRHAWKQMYIIHYMDDILIAGKDGQQVLQCFDQLKQELTAAGLHIAPEKVQLQDPYTYLGFELNGPKITNQKAVIRKDKLQTLNDFQKLLGDINWLRPYLKLTTGDLKPLFDTLKGDSDPNSHRSLSKEALASLEKVETAIAEQFVTHINYSLPLIFLIFNTALTPTGLFWQDNPIMWIHLPASPKKVLLPYYDAIADLIILGRDHSKKYFGIEPSTIIQPYSKSQIDWLMQNTEMWPIACASFVGILDNHYPPNKLIQFCKLHTF

SEQ ID NO: 183 - protein, 441 aa, Synthetic construct
MIGAIESNLFADQISWKSDQPVWLNQWPLKQEKLQALQQLVTEQLQLGHLEESNSPWNTPVFVIKKKSGKWRLLQDLRAVNATMHDMGALQPGLPSPVAVPKGWEIIIIDLQDCFFNIKLHPEDCKRFAFSVPSPNFKRPYQRFQWKVLPQGMKNSPTLCQKFVDKAILTVRDKYQDSYIVHYMDDILLAHPSRSIVDEILTSMIQALNKHGLVVSTEKIQKYDNLKYLGTHIQGDAVSYQKLQIRTDKLRTLNDFQKLLGNINWIRPFLKLTTGELKPLFEILNGDSNPISIRKLTPEACKALQLVNERLSIARVKRLDLSRPWSLCILKTEYTPTACLWQNGVLEWIHLPHISPKVITPYDIFCTQLIIKGRHRSKELFSKDPDYIVVPYTKVQFDLLLQEKEDWPISLLGFLGEVHFHLPKDPLLTFTLQTAIIFPHM

SEQ ID NO: 184 - DNA, 2031 bp, Synthetic construct
  source 1..2031: mol_type = other DNA
accctgaatattgaggatgaatacagactgcatgagacctctaaggaacccgatgtgagcctgggaagcacttggctgagcgacttccctcaggcatgggctgagactggaggcatgggcctggccgtgaggcaggcacctctgattatcctgctgaaggccacatccaccccagtgtcaattaagcagtaccccatgaggcagaaggcaagactgggaattaagccacacatccagagactgctggatcagggcatcctggtgccttgccagtccccttggaacacacccctgctgcctgtgaagaagcctggcaccaatgattataggccagtgcaggacctgagggaggtgaacaagagagtggaagacattcatcctaccgtgcctaacccatacaatctgctgtctggtctgcctccaagccaccagtggtatactgtgctggatctgaaggacgcattcttttgtctgaggctgcatcccacatcacagcctctgttcgcttttgagtggagagatcccgaaatgggaatctccggccagctgacttggacaaggctgccccagggtttcaagaactcacctgccctgtttaacgaggcactgagaagggatctggccgatttcaggattcagcacccagacctgatcctgctgcagtatgtggatgacctgctgctggctgccacctccgaactggattgccagcagggaactagggcactgctgcagacactgggtgacctggggtatagagcctcagcaaagaaggctcagatttgtcagaagcaggtgaagtacctgggttatctgctgaaggaggggcagaggtggctgaccgaggctagaaaggaaactgtgatggggcagcccacacctaagaccccaaggcagctgagaaagttcctgggaaaggctggcaattgcaggctgttcattcccggatttgccgagatggcagctccactgtaccccctgaccaagccaggaactctgtttaactggggccccgaccagcagaaggcatatcaggaaatcaagcaggctctgctgactgctcctgccctgggcctgcctgatctgacaaagcccttcgagctgtttgtggacgaaaagcagggttacgctaagggggtgctgacccagaagctgggtccttggagaaggcccgtggcctatctgtctaagaagctggaccctgtggctgcaggatggcccccttgcctgagaatggtggctgccattgctgtgctgacaaaggacgccggaaagctgactatgggacagcctctggttattggggcaccacatgctgtggaagccctggtgaagcagccacccgataggtggctgagcaaggccagaatgacccactaccaggcactgctgctggatactgacagggtgcagttcggccccgtggtggctctgaatcctgccactctgctgccactgcccgaggaaggtctgcagcataactgtctggacatcctggcagaggctcacgggacaagacctgatctgaccgaccagcctctgccagatgccgaccatacttggtatacaggtgggtctagcctgctgcaggaaggacagaggaaggccggcgcagctgtgaccactgagacagaagtgatttgggccaaggcactgccagctggaacatctgcacagagggctgagctgatcgcactgacccaggctctgagaatggccgaaggcaagaagctgaacgtgtacaccaactctaggtatgctttcgccacagcacacattcagggtgaaatctacagaaggagaggttggctgacaagcgaggggaaggaaattaagaataaggatgaaatcctggcactgctgaaggctctgtttctgcctaagagactgtccattatccactgtccaggacatcagaagggccactcagctgaggccaggggaaacagaatggctaatcaggccgcaaggaaggctgccattaccgagaacccagacaccagcactctgcccatcgaaaattcctcacct

SEQ ID NO: 185 - DNA, 2031 bp, Synthetic construct
  source 1..2031: mol_type = other DNA
accgtgtccctgcaggatgagcacagactgttcgacatccctgtgaccacttcactgccagacgtgtggctgcaggactttcctcaggcttgggctgaaaccggaggcctgggtagggcaaagtgccaggcaccaattatcattgatctgaagcctactgccgtgccagtgtctatcaagcagtaccctatgagcctggaggcacacatgggtattagacagcatatcattaagttcctggaactgggggtgctgagaccctgtaggtctccttggaacacacccctgctgcctgtgaagaagccaggaacccaggattacaggcccgtgcaggacctgagggagatcaataagagaacagtggatattcatcctaccgtgcccaacccttataatctgctgtccaccctgaagccagactactcatggtatactgtgctggatctgaaggacgctttcttttgcctgcctctggctcctcagagccaggagctgttcgctttcgagtggaaggaccctgagagaggtatctctgggcagctgacatggaccaggctgcctcagggattcaagaatagcccaaccctgtttaacgaggccctgcacagggatctgactgacttcagaacacagcatccagaagtgacactgctgcagtatgtggatgacctgctgctggctgcccccaccaagaaggcatgcactcagggcacaagacacctgctgcaggagctgggagaaaagggctatagggcatccgctaagaaggctcagatttgccagaccaaagtgacttacctgggttatattctgtcagaggggaagaggtggctgactcccggaagaatcgaaacagtggctaggattcctccacccagaaaccctagggaggtgagagagttcctgggtaaggccgggttttgtagactgttcattcccggctttgctgagctggcagctcctctgtatgccctgaccaagccttccacacctttcacctggcagactgaacatcagctggcttttgaggccctgaagaaggctctgctgtctgcccctgcactgggactgccagatacaagcaagcccttcaccctgtttctggacgagagacagggaatcgcaaagggcgtgctgactcagaagctgggtccttggaagaggcccgtggcttacctgtctaagaagctggaccctgttgctgcaggatggcctccatgcctgaggattatggctgccaccgcaatgctggtgaaggactctgctaagctgactctgggtcagcccctgacagtgatcacccctcacactctggaggctattgtgaggcagccccctgatagatggatcactaatgccagactgacacattatcaggcactgctgctggatactgacagggtgcagtttgggccacccgtgaccctgaaccctgccactctgctgccagtgcccgaaaatcagccttccccacacgactgtagacaggtgctggccgaaacccacggaaccagagaggatctgaaggaccaggaactgcctgatgcagaccacacttggtacacagatgggtctagctatctggactcaggaacaagaagggcaggcgcagctgtggtggatggacataacactatttgggctcagtccctgcctccaggcacatcagcacagaaggctgagctgatcgctctgactaaggccctggaactgtctaagggaaagaaggccaatatctacacagacagcagatatgctttcgccaccgcacacactcatggctccatctacgagagaaggggatggctgacctcagagggcaaggaaattaagaacaaggcagagatcattgctctgctgaaggccctgtttctgccacaggaagtggctatcattcactgcccaggtcatcagaaaggacaggaccctgtggctgtgggaaacaggcaggcagacagggtggctagacaggccgcaatggccgaggtgctgacactggcaaccgaacccgataatacctctcacattact

SEQ ID NO: 186 - DNA, 2019 bp, Synthetic construct
  source 1..2019: mol_type = other DNA
ctggtgctgaacctggaggaagagtacagactgaacgagaagcctgtgcctccatccattgatccatcatggctgcagctgttccctatggtgtgggctgaaaaggccggtatggggctggccaatcaggtgccccctgtggtggtggagctgaagtctgatgccagccctgtggcagtgagacagtacccaatgtctaaggaagctagagagggtattaggcctcatatccagaggtttctggacctggggattctggtgccctgccagagcccttggaacaccccactgctgcccgtgaagaagcccggcactaatgattataggcctgtgcaggacctgagagaagtgaacaagagggtgcaggatattcacccaactgtgccaaacccctacaatctgctgtctagcctgccaccctctcatacatggtatagcgtgctggatctgaaggacgccttcttttgtctgaagctgcacccaaactcccagcccctgttcgctttcgagtggagagatcctgagaagggaaacaccggccagctgacttggacaaggctgccacagggattcaagaactctcccactctgtttaacgaggccctgcatagagacctggcttcattcagggccctgaatcctcaggttgtgatgctgcagtatgtggatgacctgctggtggctgccccaacctatagagactgcaaggaaggaactagaaggctgctgcaggagctgtccaagctgggctacagagtgtcagcaaagaaggctcagctgtgcagggaagaggtgacatacctgggttatctgctgaagggaggcaagagatggctgaccccagccaggaaggcaactgtgatgaagattcctacaccaaccactcccagacaggtgagggagttcctgggtaaggcagggttttgcagactgttcattcctgggttcgcttccctggcagctcctctgtatccactgacaagacctaaggtgcctttcacctggactgaagcacaccaggaggcttttggaaggattaaggaggctctgctgtcagctcccgccctggcactgcctgatctgaccaagccatttgccctgtatgtggatgaaaaggagggagtggcaaggggcgtgctgacacagaccctgggtccttggagaaggccagtggcttatctgtctaagaagctggaccctgttgccagcggatggccaacatgcctgaaggctatcgccgcagtggccctgctgctgaaggatgctgacaagctgaccctgggccagaacgtgctggttattgcccctcacaatctggaaagcatcgtgagacagcctccagacaggtggatgacaaatgcaagaatgacccattaccagtccctgctgctgaacgagagggtgtcattcgctccccctgccattctgaatcccgctactctgctgcctgtggaatctgatgacacaccaattcatatctgtagcgagatcctggctgaagagactggtacaagacccgatctgagagaccagccactgcctggagtgcctgcctggtatactgatggatcttctttcattatggatggaagaaggcaggcaggcgctgccatcgtggataacaagagaacagtgtgggcttctaatctgcctgaaggaaccagcgcacagaaggctgagctgattgccctgacccaggcactgagactggctgagggcaagtccattaacatctacacagattcaaggtatgcttttgccaccgcacacgtgcatggtgccatctacaagcagagaggttggctgacttctgcagggaaggacattaagaataaggaagagatcctggccctgctggaagcaatccacctgccaaagagggtggccattatccactgtcctggtcatcagagagggactgatccagtggcaacaggaaacaggaaggctgacgaggcagctaagcaggccgcacagagcaccaggattctgactgaaacaaccaagaatcaggagcat

SEQ ID NO: 187 - DNA, 2019 bp, Synthetic construct
  source 1..2019: mol_type = other DNA
accgctcctctggaggaagagtacagactgttcctggaagcacctattcagaacgtgactctgctggagcagtggaagagggaaattcctaaagtgtgggccgagatcaatcctccaggactggcttccacacaggccccaattcacgtgcagctgctgtcaaccgccctgcccgtgagagtgaggcagtaccctatcacactggaggcaaagaggtctctgagggaaaccattagaaagtttagggctgccggaatcctgagacccgtgcacagcccttggaacactccactgctgcccgtgagaaagtccggcacatcagagtataggatggtgcaggatctgagagaggtgaacaagagggtggaaaccattcatcctactgtgccaaatccctacaccctgctgtctctgctgccccctgacagaatctggtatagcgtgctggatctgaaggacgctttcttttgcattcctctggccccagagtcccagctgatcttcgcctttgaatgggcagatgctgaagagggagagtctggccagctgacctggactaggctgccacagggattcaagaacagccccactctgtttaacgaagctctgaatagagacctgcagggcttcaggctggaccacccatctgtgagcctgctgcagtatgtggatgacctgctgattgcagctgatacacaggccgcatgcctgtccgccactagagacctgctgatgacactggcagagctgggttacagggtgtcagggaagaaggcccagctgtgccaggaagaagtgacttatctgggttttaagatccataaggggtccagatcactgtctaacagcaggacacaggctattctgcagatccctgtgccaaagaccaagagacaggtgagggagttcctgggtaagattgggtactgtagactgttcattcctggttttgcagagctggctcagccactgtatgctgccacaaggggaggcaatgatcctctggtgtggggagagaaggaagaggaagcattccagtctctgaagctggctctgactcagccacccgccctggcactgccttccctggacaagccattccagctgtttgtggaggaaacctcaggagcagctaagggcgtgctgactcaggctctgggtccttggaagagacccgtggcctacctgtctaagagactggaccctgttgctgcaggatggccaagatgcctgagggcaatcgctgccgcagctctgctgaccagagaggcttctaagctgaccttcggacaggacattgaaatcacctctagccataacctggagtccctgctgagatcacctccagacaagtggctgacaaatgccaggattacccagtatcaggtgctgctgctggaccctcctagagtgagattcaagcagacagccgcactgaaccccgctaccctgctgcctgagaccgatgacactctgccaatccaccattgtctggataccctggactctctgacaagcaccaggcctgatctgactgaccagccactggctcaggccgaagcaacactgttcaccgatggctcctcatacattagagacggaaagaggtatgctggagctgccgtggtgactctggattctgtgatttgggctgagcccctgcctatcggtactagcgcccagaaggcagaactgattgcactgacaaaggctctggagtggtctaaggataagagcgtgaacatctacactgattctaggtatgcttttgccacactgcacgtgcatggaatgatctacagagaaaggggctggctgacagccggtgggaaggcaattaagaatgctccagagatcctggccctgctgactgcagtgtggctgcccaagagggtggctgtgatgcactgcaagggtcatcagaaggatgacgcccccactagcacagggaatagaagggctgatgaggtggccagagaagtggcaattaggccactgtccactcaggctacaatctca

SEQ ID NO: 188 - DNA, 2019 bp, Synthetic construct
  source 1..2019: mol_type = other DNA
accgctcctctggaggaagagtacagactgttcctggaagcacctattcagaacgtgactctgctggagcagtggaagagggaaattcctaaagtgtgggccgagatcaatcctccaggactggcttccacacaggccccaattcacgtgcagctgctgtcaaccgccctgcccgtgagagtgaggcagtaccctatcacactggaggcaaagaggtctctgagggaaaccattagaaagtttagggctgccggaatcctgagacccgtgcacagcccttggaacactccactgctgcccgtgagaaagtccggcacatcagagtataggatggtgcaggatctgagagaggtgaacaagagggtggaaaccattcatcctactgtgccaaatccctacaccctgctgtctctgctgccccctgacagaatctggtatagcgtgctggatctgaaggacgctttcttttgcattcctctggccccagagtcccagctgatcttcgcctttgaatgggcagatgctgaagagggagagtctggccagctgacctggactaggctgccacagggattcaagaacagccccactctgtttaacgaagctctgaatagagacctgcagggcttcaggctggaccacccatctgtgagcctgctgcagtatgtggatgacctgctgattgcagctgatacacaggccgcatgcctgtccgccactagagacctgctgatgacactggcagagctgggttacagggtgtcagggaagaaggcccagctgtgccaggaagaagtgacttatctgggttttaagatccataaggggtccagatcactgtctaacagcaggacacaggctattctgcagatccctgtgccaaagaccaagagacaggtgagggagttcctgggtaagattgggtactgtagactgttcattcctggttttgcagagctggctcagccactgtatgctgccacaaggcctggcaatgatcctctggtgtggggagagaaggaagaggaagcattccagtctctgaagctggctctgactcagccacccgccctggcactgccttccctggacaagccattccagctgtttgtggaggaaacctcaggagcagctaagggcgtgctgactcaggctctgggtccttggaagagacccgtggcctacctgtctaagagactggaccctgttgctgcaggatggccaagatgcctgagggcaatcgctgccgcagctctgctgaccagagaggcttctaagctgaccttcggacaggacattgaaatcacctctagccataacctggagtccctgctgagatcacctccagacaagtggctgacaaatgccaggattacccagtatcaggtgctgctgctggaccctcctagagtgagattcaagcagacagccgcactgaaccccgctaccctgctgcctgagaccgatgacactctgccaatccaccattgtctggataccctggactctctgacaagcaccaggcctgatctgactgaccagccactggctcaggccgaagcaacactgttcaccgatggctcctcatacattagagacggaaagaggtatgctggagctgccgtggtgactctggattctgtgatttgggctgagcccctgcctatcggtactagcgcccagaaggcagaactgattgcactgacaaaggctctggagtggtctaaggataagagcgtgaacatctacactgattctaggtatgcttttgccacactgcacgtgcatggaatgatctacagagaaaggggctggctgacagccggtgggaaggcaattaagaatgctccagagatcctggccctgctgactgcagtgtggctgcccaagagggtggctgtgatgcactgcaagggtcatcagaaggatgacgcccccactagcacagggaatagaagggctgatgaggtggccagagaagtggcaattaggccactgtccactcaggctacaatctca

SEQ ID NO: 189 - DNA, 2013 bp, Synthetic construct
  source 1..2013: mol_type = other DNA
accctgaatattgaggatgaatacagactgcacgagacctccaagggacccgatgtgcctctgggctctacttggctgagcgacttccctcaggcatgggctgaaaccggaggcatgggcctggccgtgaggcaggcacccctgattatccctctgagagctgcctccactccagtgtctattaagcagtacccaatgtctagggaggccagactgggaattaagccacatatccagagactgctggatcagggcatcctggtgccatgccagagcccctggaacacaccactgctgcccgtgaagaagcccgggaccaatgattataggcctgtgcaggacctgagggaggtgaacaagagagtggaagacattcacccaaccgtgcctaacccatacaatctgctgtctggactgcctccaagccatcagtggtatactgtgctggatctgaaggacgcattcttttgtctgaggctgcaccccacatcccagtcactgttcgcttttgagtggagagaccctgaaatgggtatctccgggcagctgacatggaccaggctgccacagggcttcaagaactcacccacactgtttaacgaggcactgcacagggatctggctgatttcaggattcagcatcctgacctgatcctgctgcagtatgtggatgacctgctgctggcagctacctccgaactggattgccagcagggtactagggctctgctgcagacactgggagacctgggctatagagcctcagcaaagaaggcccagatttgccagaagcaggtgaagtacctgggttatctgctgaaggaggggcagaggtggctgaccgaggctagaaaggaaactgtgatgggccagcccacccctaagactccaaggcagctgagagagttcctgggaaaggctgggttttgcaggctgttcattcccggtttcgccgaaatggccgcacctctgtacccactgactaagcctggaaccctgtttaagtggggcccagatcagcagaaggcttatcaggaaatcaagcaggccctgctgactgctcccgccctgggtctgcctgatctgacaaagccattcgagctgtttgtggacgaaaagcagggatacgccaagggcgtgctgactcagaagctgggaccttggagaaggccagtggcatatctgtctaagaagctggaccctgtggctgctggatggcccccttgcctgagaatggtggcagctattgccgtgctgacaaaggacgcaggaaagctgactatgggacagcccctggttattctggcacctcacgctgtggaggccctggtgaagcagccacccgacaggtggctgagcaatgcaagaatgacccattaccaggctctgctgctggatactgacagggtgcagttcgggccaattgtgaccctgaaccctgccactctgctgccactgcctgaggaaggtctgcagcacgattgtctggacatcctggcagaggctcatgggacaagacccgatctgaccgaccagcctctgccagatgctgaccatacatggtataccgatggctctagctttctgcaggagggtcagaggaaggcaggggccgcagtgaccactgagactgaagtgatttgggccaaggcactgcctgctggtacatctgcacagagagctgagctgatcgctctgacccaggccctgaagatggcagaaggaaagaagctgaacgtgtacactgactctaggtatgctttcgccacagcacacattcatggagaaatctacagaaggagaggttggctgacaagcgaggggaaggaaattaagaacaaggaggaaatcctggctctgctgaaggccctgtttctgcctaagagactgtccattatccactgtccaggtcatcagaaggggaacagggctgaggccaggggaaatagaatggccgatcaggctgccagggaagtggctactagagagacaccagaaacttcaacactgctg

SEQ ID NO: 190 - DNA, 1680 bp, Synthetic construct
  source 1..1680: mol_type = other DNA
cctatttctccaatcgagaccgtgcctgtgaagctgaagccaggcatggatggccccaaggtgaagcagtggccactgacagaggaaaagattaaggctctggtggagatttgcaccgagatggaaaaggagggaaagatttctaagattgggcccgaaaacccttacaataccccagtgttcgctattaagaagaaggattcaactaagtggagaaagctggtggacttcagagaactgaacaagaggactcaggacttttgggaagtgcagctgggcattcctcaccctgcaggactgaagaagaagaagtctgtgacagtgctggatgtgggagacgcttacttttcagtgccactggatgaagacttcagaaagtatacagcctttaccattccatctatcaacaatgagacccccggaattagataccagtataacgtgctgcctcagggttggaaggggagcccagcaattttcaactctagcatgactaagatcctggagccctttagaaagcagaatcctgatattgtgatctaccagtatatggatgacctgtatgtgggtagcgacctggaaattgggcagcacaggactaagatcgaggaactgagacagcatctgctgagatggggtctgaccactccagataagaagcaccagaaggaacctccattcctgtggatggggtacgagctgcatcccgacaagtggactgtgcagccaattgtgctgcccgagaaggattcttggacagtgaacgacatccagaagctggtgggaaagctgaattgggccagccaattctaccccggcatcaaggtgagacagctgtgcaagctgctgaggggtactaaggcactgacagaagtgattcctctgaccgagcctgctgaactggagctggccgaaaacagggagatcctgaaggaacccgtgcacggcgtgtactatgatccttccaaggacctgattgctgagatccagaagcagggtcaggggcagtggacctaccaaatctaccaggaacctttcaagaacctgaagactggaaagtacgcaagaatgaggggcgctcataccaatgatgtgaagcagctgactgaagcagtgcagaagattacaaccgagtcaattgtgatctggggaaagacacctaagtttaagctgccaatccagaaggaaacttgggagacatggtggaccgagtattggcaggctacttggattcctgaatgggagttcgtgaatacaccccctctggtgaagctgtggtatcagctggaaaaggagccaatcgtgggtgcagaaaccttttatgtggatggggctgccaacagagagacaaagctgggaaaggctggctacgtgaccaatagaggaaggcagaaggtggtgaccctgactgacactacaaaccagaagacagaactgcaggcaatctacctggctctgcaggattctggtctggaggttaatatcgtgaccgacagccagtatgccctggggattatccaggcacagccagatcagtccgaatcagagctggtgaaccagattatcgaacagctgattaagaaggagaaggtgtatctggcctgggtgcccgcacataagggaattggaggcaatgagcaggtggacaagctggtgtctgccggcatcaggaaggtgctg

SEQ ID NO: 191 - DNA, 2253 bp, Synthetic construct
  source 1..2253: mol_type = other DNA
atgaatccactgcagctgctgcagccactgcctgcagaaatcaagggaaccaagctgctggctcactgggattccggggccactatcacatgcattcctgaatcatttctggaggacgaacagccaattaagaagacactgatcaagaccattcatggtgaaaagcagcagaacgtgtactatgtgactttcaaggtgaaggggagaaaggtggaggctgaagtgatcgcctccccctacgagtatattctgctgtcaccaacagatgtgccctggctgacccagcagcctctgcagctgacaatcctggtgccactgcaggagtaccaggaaaagattctgtctaagactgctctgccagaagatcagaagcagcagctgaagacactgtttgtgaagtatgacaatctgtggcagcactgggagaaccaagtgggacacagaaagattaggccacataatatcgctacaggcgactaccctccaaggccccagaagcagtatcctattaacccaaaggccaagccttccattcagatcgtgattgatgacctgctgaagcagggtgtgctgacccctcagaactctaccatgaacaccccagtgtaccctgtgccaaagcccgatgggagatggaggatggtgctggactatagagaagtgaataagactatcccactgacagctgcccagaaccagcactctgcaggaatcctggctactattgtgaggcagaagtacaagaccactctggatctggccaatggcttttgggcacatcccattacacctgaatcctactggctgactgcattcacatggcagggaaagcagtattgttggaccagactgccacagggattcctgaactctcccgccctgttcactgcagatgtggtggacctgctgaaggagatccctaacgtgcaggtgtatgtggatgacatctacctgagccacgatgacccaaaggagcatgtgcagcagctggaaaaggtgtttcagatcctgctgcaggctggatatgtggtgtctctgaagaagagcgagatcggtcagaagaccgtggagttcctggggtttaatattactaaggaaggaagaggcctgaccgatactttcaagactaagctgctgaacattacaccccctaaggacctgaagcagctgcagtctatcctgggtctgctgaacttcgccaggaacttcattccaaacttcgcagagctggtgcagcccctgtacaatctgatcgcctctgcaaaggggaagtatattgagtggagcgaggaaaataccaagcagctgaacatggttattgaagctctgaatactgccagcaacctggaggaaagactgccagagcagagactggttattaaggtgaacacttccccctcagcaggatacgtgagatactataatgagacaggcaagaagcctatcatgtacctgaactacgtgttctctaaggctgagctgaagttcagcatgctggaaaagctgctgacaaccatgcacaaggcactgattaaggctatggatctggctatgggacaggaaattctggtgtactccccaatcgtgtcaatgaccaagattcagaagactcctctgccagagagaaaggctctgcctatcaggtggattacctggatgacttacctggaagatccaaggattcagtttcactatgacaagacactgcccgagctgaagcatattcctgacgtgtatacctctagccagtctcctgtgaagcatccaagccagtacgaaggagtgttctatacagatggctctgccatcaagagccccgaccctaccaagtctaacaatgctggtatggggattgtgcacgctacatacaagcccgagtatcaggtgctgaatcagtggagcatccctctgggaaaccataccgcacagatggctgagattgcagctgtggaatttgcatgcaagaaggctctgaagatcccaggccctgtgctggttattactgattccttttacgtggccgagtcagcaaataaggaactgccctattggaagtccaacggcttcgtgaacaacaagaagaagcctctgaagcacatctccaagtggaagtcaattgccgagtgtctgtctatgaagccagatattaccattcagcatgaaaagggtatcagcctgcagattcccgtgttcatcctgaagggtaatgctctggccgacaagctggcaactcagggatcttacgtggtgaac

SEQ ID NO: 192 - DNA, 1755 bp, Synthetic construct
  source 1..1755: mol_type = other DNA
ctgaccgctgccatcgacattctggctccccagcagtgcgccgagcctatcacctggaagtcagatgaaccagtgtgggtggaccagtggccactgactaacgataagctggcagctgcccagcagctggtgcaggagcagctggaagccggacacattactgagtctagctccccttggaacacaccaatctttgtgattaagaagaagtctggcaagtggagactgctgcaggacctgagggccgtgaatgcaacaatggtgctgatgggtgctctgcagccaggactgccatcccctgtggcaatcccccagggttacctgaagattatcattgatctgaaggactgtttctttagcattcctctgcatccatccgatcagaagagattcgctttctctctgccctccaccaacttcaaggaacctatgcagaggtttcagtggaaggtgctgccacaggggatggctaattcccccaccctgtgccagaagtatgtggctactgccatccacaaggtgagacatgcctggaagcagatgtacatcattcactatatggatgacatcctgattgcaggaaaggacggccagcaggtgctgcagtgtttcgatcagctgaagcaggagctgactgcagctggactgcatattgcccccgaaaaggtgcagctgcaggacccttacacttatctgggattcgagctgaacggcccaaagatcacaaatcagaaggcagtgattagaaaggataagctgcagaccctgaacgactttcagaagctgctgggagatattaactggctgaggccctacctgaagctgaccactggcgatctgaagcctctgttcgacactctgaagggcgattcagacccaaactctcacagaagcctgtccaaggaggcactggcttcactggagaaggtggaaacagccatcgcagaacagtttgtgacccatattaactattctctgccactgatcttcctgattttcaacaccgctctgactcctacaggtctgttctggcaggacaatccaatcatgtggattcacctgcccgccagccctaagaaggtgctgctgccctactatgatgctatcgccgacctgatcattctgggtagggatcatagcaagaagtactttgggatcgagccatccacaatcattcagccctattcaaagtctcagattgactggctgatgcagaataccgaaatgtggcctatcgcatgcgcttcattcgtgggcattctggataaccactaccctccaaataagctgattcagttttgtaagctgcataccttcgtgtttcctcagatcatttctaagactccactgaacaatgccctgctggtgttcacagacggatcatctaccggcatggccgcatataccctgactgatacaaccatcaagtttcagactaacctgaatagcgcacagctggtggaactgcaggctctgattgccgtgctgtccgctttcccaaaccagcccctgaatatctacacagactcagcatatctggctcactctattcccctgctggagacagtggcacagatcaagcatattagcgaaaccgctaagctgttcctgcagtgccagcagctgatctacaacagatcaatccctttttatatcggtcacgtgagggcccattctggtctgccagggcccattgcacaggggaatcagagggccgatctggcaactaagatcgtggcttccaacattaataca

SEQ ID NO: 193 - DNA, 1731 bp, Synthetic construct
  source 1..1731: mol_type = other DNA
atgattggcgccatcgagtccaacctgtttgcagatcagatttcttggaagtcagaccagcccgtgtggctgaatcagtggcctctgaagcaggagaagctgcaggctctgcagcagctggtgaccgaacagctgcagctgggccacctggaggaatctaacagcccctggaatactccagtgttcgtgattaagaagaagtctggaaagtggagactgctgcaggatctgagggcagtgaatgctaccatgcatgacatgggggctctgcagcctggactgccatctcctgtggccgtgcccaagggatgggagattatcattatcgatctgcaggactgcttctttaacatcaagctgcaccctgaagattgtaagagattcgccttttctgtgcccagccctaatttcaagagaccatatcagaggtttcagtggaaggtgctgccacagggtatgaagaactcccccacactgtgccagaagtttgtggataaggcaattctgaccgtgagagacaagtaccaggactcatatattgtgcactacatggatgacatcctgctggcccatccttccaggtcaattgtggacgagatcctgacttccatgatccaggcactgaacaagcacgggctggtggtgtcaactgaaaagatccagaagtacgataatctgaagtacctgggcacacatatccagggtgacgccgtgtcataccagaagctgcagattagaactgataagctgaggacactgaacgacttccagaagctgctgggaaacattaattggatcagacccttcctgaagctgaccactggggagctgaagcctctgtttgaaatcctgaacggagattccaatcccatttcaatcaggaagctgacacctgaggcctgcaaggcactgcagctggtgaacgagagactgtctatcgctcgtgtgaagagactggatctgtctcggccttggagcctgtgcattctgaagaccgagtatactcccacagcctgtctgtggcagaacggagtgctggagtggattcacctgccacatatcagccccaaagtgattacaccttacgatattttctgcacccagctgattatcaagggaagacataggtccaaggagctgttttcaaaggaccctgactatatcgtggtgccatacaccaaggtgcagttcgatctgctgctgcaggagaaggaagactggccaatttccctgctgggattcctgggcgaggtgcactttcatctgcctaaggaccctctgctgaccttcactctgcagactgcaattatctttcctcacatgacatcaacaaccccactggaaaaggggattgtgatctttaccgacggctctgctaatggtagaagcgtgacttatatccagggaagggagccaattatcaaggaaaacactcagaatacagctcagcaggccgaaattgtggcagtgatcactgctttcgaggaagtgtctcagagctttaacctgtataccgattctaagtatgtgactggtctgtttcctgagattgaaacagctaccctgagcccaagaaccaaaatctacactgagctgagacacctgcagaggctgattcataagagacaggaaaagttctacattggccacatcaggggtcatacagggctgccaggacccctggcacagggtaatgcttacgccgactccctgacaaggattctgaccgct

SEQ ID NO: 194 - DNA, 2253 bp, Synthetic construct
  source 1..2253: mol_type = other DNA
atgaatccactgcagctgctgcagccactgcctgcagaaatcaagggaaccaagctgctggctcactgggattccggggccactatcacatgcattcctgaatcatttctggaggacgaacagccaattaagaagacactgatcaagaccattcatggtgaaaagcagcagaacgtgtactatgtgactttcaaggtgaaggggagaaaggtggaggctgaagtgatcgcctccccctacgagtatattctgctgtcaccaacagatgtgccctggctgacccagcagcctctgcagctgacaatcctggtgccactgcaggagtaccaggaaaagattctgtctaagactgctctgccagaagatcagaagcagcagctgaagacactgtttgtgaagtatgacaatctgtggcagcactgggagaaccaagtgggacacagaaagattaggccacataatatcgctacaggcgactaccctccaaggccccagaagcagtatcctattaacccaaaggccaagccttccattcagatcgtgattgatgacctgctgaagcagggtgtgctgacccctcagaactctaccatgaacaccccagtgtaccctgtgccaaagcccgatgggagatggaggatggtgctggactatagagaagtgaataagactatcccactgacagctgcccagaaccagcactctgcaggaatcctggctactattgtgaggcagaagtacaagaccactctggatctggccaatggcttttgggcacatcccattacacctgaatcctactggctgactgcattcacatggcagggaaagcagtattgttggaccagactgccacagggattcctgaactctcccgccctgttcaacgcagatgtggtggacctgctgaaggagatccctaacgtgcaggtgtatgtggatgacatctacctgagccacgatgacccaaaggagcatgtgcagcagctggaaaaggtgtttcagatcctgctgcaggctggatatgtggtgtctctgaagaagagcgagatcggtcagaagaccgtggagttcctggggtttaatattactaaggaaggaagaggcctgaccgatactttcaagactaagctgctgaacattacaccccctaaggacctgaagcagctgcagtctatcctgggtaagctgaacttcgccaggaacttcattccaaacttcgcagagctggtgcagcccctgtacaatctgatcgcctctgcaaagcctaagtatattgagtggagcgaggaaaataccaagcagctgaacatggttattgaagctctgaatactgccagcaacctggaggaaagactgccagagcagagactggttattaaggtgaacacttccccctcagcaggatacgtgagatactataatgagacaggcaagaagcctatcatgtacctgaactacgtgttctctaaggctgagctgaagttcagcatgctggaaaagctgctgacaaccatgcacaaggcactgattaaggctatggatctggctatgggacaggaaattctggtgtactccccaatcgtgtcaatgaccaagattcagaagactcctctgccagagagaaaggctctgcctatcaggtggattacctggatgacttacctggaagatccaaggattcagtttcactatgacaagacactgcccgagctgaagcatattcctgacgtgtatacctctagccagtctcctgtgaagcatccaagccagtacgaaggagtgttctatacagatggctctgccatcaagagccccgaccctaccaagtctaacaatgctggtatggggattgtgcacgctacatacaagcccgagtatcaggtgctgaatcagtggagcatccctctgggaaaccataccgcacagatggctgagattgcagctgtggaatttgcatgcaagaaggctctgaagatcccaggccctgtgctggttattactgattccttttacgtggccgagtcagcaaataaggaactgccctattggaagtccaacggcttcgtgaacaacaagaagaagcctctgaagcacatctccaagtggaagtcaattgccgagtgtctgtctatgaagccagatattaccattcagcatgaaaagggtatcagcctgcagattcccgtgttcatcctgaagggtaatgctctggccgacaagctggcaactcagggatcttacgtggtgaac

SEQ ID NO: 195 - DNA, 2253 bp, Synthetic construct
  source 1..2253: mol_type = other DNA
atgaatccactgcagctgctgcagccactgcctgcagaaatcaagggaaccaagctgctggctcactgggattccggggccactatcacatgcattcctgaatcatttctggaggacgaacagccaattaagaagacactgatcaagaccattcatggtgaaaagcagcagaacgtgtactatgtgactttcaaggtgaaggggagaaaggtggaggctgaagtgatcgcctccccctacgagtatattctgctgtcaccaacagatgtgccctggctgacccagcagcctctgcagctgacaatcctggtgccactgcaggagtaccaggaaaagattctgtctaagactgctctgccagaagatcagaagcagcagctgaagacactgtttgtgaagtatgacaatctgtggcagcactgggagaaccaagtgggacacagaaagattaggccacataatatcgctacaggcgactaccctccaaggccccagaagcagtatcctattaacccaaaggccaagccttccattcagatcgtgattgatgacctgctgaagcagggtgtgctgacccctcagaactctaccatgaacaccccagtgtaccctgtgccaaagcccgatgggagatggaggatggtgctggactatagagaagtgaataagactatcccactgacagctgcccagaaccagcactctgcaggaatcctggctactattgtgaggcagaagtacaagaccactctggatctggccaatggcttttgggcacatcccattacacctgaatcctactggctgactgcattcacatggcagggaaagcagtattgttggaccagactgccacagggattcctgaactctcccgccctgttcaacgcagatgtggtggacctgctgaaggagatccctaacgtgcaggtgtatgtggatgacatctacctgagccacgatgacccaaaggagcatgtgcagcagctggaaaaggtgtttcagatcctgctgcaggctggatatgtggtgtctctgaagaagagcgagatcggtcagaagaccgtggagttcctggggtttaatattactaaggaaggaagaggcctgaccgatactttcaagactaagctgctgaacattacaccccctaaggacctgaagcagctgcagtctatcctgggtaagctgaacttcgccaggaacttcattccaaacttcgcagagctggtgcagcccctgtacaatctgatcgcctctgcaaaggggccttatattgagtggagcgaggaaaataccaagcagctgaacatggttattgaagctctgaatactgccagcaacctggaggaaagactgccagagcagagactggttattaaggtgaacacttccccctcagcaggatacgtgagatactataatgagacaggcaagaagcctatcatgtacctgaactacgtgttctctaaggctgagctgaagttcagcatgctggaaaagctgctgacaaccatgcacaaggcactgattaaggctatggatctggctatgggacaggaaattctggtgtactccccaatcgtgtcaatgaccaagattcagaagactcctctgccagagagaaaggctctgcctatcaggtggattacctggatgacttacctggaagatccaaggattcagtttcactatgacaagacactgcccgagctgaagcatattcctgacgtgtatacctctagccagtctcctgtgaagcatccaagccagtacgaaggagtgttctatacagatggctctgccatcaagagccccgaccctaccaagtctaacaatgctggtatggggattgtgcacgctacatacaagcccgagtatcaggtgctgaatcagtggagcatccctctgggaaaccataccgcacagatggctgagattgcagctgtggaatttgcatgcaagaaggctctgaagatcccaggccctgtgctggttattactgattccttttacgtggccgagtcagcaaataaggaactgccctattggaagtccaacggcttcgtgaacaacaagaagaagcctctgaagcacatctccaagtggaagtcaattgccgagtgtctgtctatgaagccagatattaccattcagcatgaaaagggtatcagcctgcagattcccgtgttcatcctgaagggtaatgctctggccgacaagctggcaactcagggatcttacgtggtgaac

SEQ ID NO: 196 - DNA, 1755 bp, Synthetic construct; identical to SEQ ID NO: 192
  source 1..1755: mol_type = other DNA

SEQ ID NO: 197 - DNA, 1755 bp, Synthetic construct
  source 1..1755: mol_type = other DNA
ctgaccgctgccatcgacattctggctccccagcagtgcgccgagcctatcacctggaagtcagatgaaccagtgtgggtggaccagtggccactgactaacgataagctggcagctgcccagcagctggtgcaggagcagctggaagccggacacattactgagtctagctccccttggaacacaccaatctttgtgattaagaagaagtctggcaagtggagactgctgcaggacctgagggccgtgaatgcaacaatggtgctgatgggtgctctgcagccaggactgccatcccctgtggcaatcccccagggttacctgaagattatcattgatctgaaggactgtttctttagcattcctctgcatccatccgatcagaagagattcgctttctctctgccctccaccaacttcaaggaacctatgcagaggtttcagtggaaggtgctgccacaggggatggctaattcccccaccctgtgcaacaagtatgtggctactgccatccacaaggtgagacatgcctggaagcagatgtacatcattcactatatggatgacatcctgattgcaggaaaggacggccagcaggtgctgcagtgtttcgatcagctgaagcaggagctgactgcagctggactgcatattgcccccgaaaaggtgcagctgcaggacccttacacttatctgggattcgagctgaacggcccaaagatcacaaatcagaaggcagtgattagaaaggataagctgcagaccctgaacgactttcagaagctgctgggaaagattaactggctgaggcccttcctgaagctgaccactggcgatctgaagcctctgttcgacactctgaagggcgattcagacccaaactctcacagaagcctgtccaaggaggcactggcttcactggagaaggtggaaacagccatcgcagaacagtttgtgacccatattaactattctctgccactgatcttcctgattttcaacaccgctctgactcctacaggtctgttctggcaggacaatccaatcatgtggattcacctgcccgccagccctaagaaggtgctgctgccctactatgatgctatcgccgacctgatcattctgggtagggatcatagcaagaagtactttgggatcgagccatccacaatcattcagccctattcaaagtctcagattgactggctgatgcagaataccgaaatgtggcctatcgcatgcgcttcattcgtgggcattctggataaccactaccctccaaataagctgattcagttttgtaagctgcataccttcgtgtttcctcagatcatttctaagactccactgaacaatgccctgctggtgttcacagacggatcatctaccggcatggccgcatataccctgactgatacaaccatcaagtttcagactaacctgaatagcgcacagctggtggaactgcaggctctgattgccgtgctgtccgctttcccaaaccagcccctgaatatctacacagactcagcatatctggctcactctattcccctgctggagacagtggcacagatcaagcatattagcgaaaccgctaagctgttcctgcagtgccagcagctgatctacaacagatcaatccctttttatatcggtcacgtgagggcccattctggtctgccagggcccattgcacaggggaatcagagggccgatctggcaactaagatcgtggcttccaacattaataca

SEQ ID NO: 198 - DNA, 1755 bp, Synthetic construct
  source 1..1755: mol_type = other DNA
ctgaccgctgccatcgacattctggctccccagcagtgcgccgagcctatcacctggaagtcagatgaaccagtgtgggtggaccagtggccactgactaacgataagctggcagctgcccagcagctggtgcaggagcagctggaagccggacacattactgagtctagctccccttggaacacaccaatctttgtgattaagaagaagtctggcaagtggagactgctgcaggacctgagggccgtgaatgcaacaatggtgctgatgggtgctctgcagccaggactgccatcccctgtggcaatcccccagggttacctgaagattatcattgatctgaaggactgtttctttagcattcctctgcatccatccgatcagaagagattcgctttctctctgccctccaccaacttcaaggaacctatgcagaggtttcagtggaaggtgctgccacaggggatggctaattcccccaccctgtgccagaagtatgtggctactgccatccacaaggtgagacatgcctggaagcagatgtacatcattcactatatggatgacatcctgattgcaggaaaggacggccagcaggtgctgcagtgtttcgatcagctgaagcaggagctgactgcagctggactgcatattgcccccgaaaaggtgcagctgcaggacccttacacttatctgggattcgagctgaacggcccaaagatcacaaatcagaaggcagtgattagaaaggataagctgcagaccctgaacgactttcagaagctgctgggaaagattaactggctgaggcccttcctgaagctgaccactggcgatctgaagcctctgttcgacactctgaagcctgattcagacccaaactctcacagaagcctgtccaaggaggcactggcttcactggagaaggtggaaacagccatcgcagaacagtttgtgacccatattaactattctctgccactgatcttcctgattttcaacaccgctctgactcctacaggtctgttctggcaggacaatccaatcatgtggattcacctgcccgccagccctaagaaggtgctgctgccctactatgatgctatcgccgacctgatcattctgggtagggatcatagcaagaagtactttgggatcgagccatccacaatcattcagccctattcaaagtctcagattgactggctgatgcagaataccgaaatgtggcctatcgcatgcgcttcattcgtgggcattctggataaccactaccctccaaataagctgattcagttttgtaagctgcataccttcgtgtttcctcagatcatttctaagactccactgaacaatgccctgctggtgttcacagacggatcatctaccggcatggccgcatataccctgactgatacaaccatcaagtttcagactaacctgaatagcgcacagctggtggaactgcaggctctgattgccgtgctgtccgctttcccaaaccagcccctgaatatctacacagactcagcatatctggctcactctattcccctgctggagacagtggcacagatcaagcatattagcgaaaccgctaagctgttcctgcagtgccagcagctgatctacaacagatcaatccctttttatatcggtcacgtgagggcccattctggtctgccagggcccattgcacaggggaatcagagggccgatctggcaactaagatcgtggcttccaacattaataca

SEQ ID NO: 199 - DNA, 1755 bp, Synthetic construct
  source 1..1755: mol_type = other DNA
ctgaccgctgccatcgacattctggctccccagcagtgcgccgagcctatcacctggaagtcagatgaaccagtgtgggtggaccagtggccactgactaacgataagctggcagctgcccagcagctggtgcaggagcagctggaagccggacacattactgagtctagctccccttggaacacaccaatctttgtgattaagaagaagtctggcaagtggagactgctgcaggacctgagggccgtgaatgcaacaatggtgctgatgggtgctctgcagccaggactgccatcccctgtggcaatcccccagggttacctgaagattatcattgatctgaaggactgtttctttagcattcctctgcatccatccgatcagaagagattcgctttctctctgccctccaccaacttcaaggaacctatgcagaggtttcagtggaaggtgctgccacaggggatggctaattcccccaccctgtgccagaagtatgtggctactgccatccacaaggtgagacatgcctggaagcagatgtacatcattcactatatggatgacatcctgattgcaggaaaggacggccagcaggtgctgcagtgtttcgatcagctgaagcaggagctgactgcagctggactgcatattgcccccgaaaaggtgcagctgcaggacccttacacttatctgggattcgagctgaacggcccaaagatcacaaatcagaaggcagtgattagaaaggataagctgcagaccctgaacgactttcagaagctgctgggaaagattaactggctgaggcccttcctgaagctgaccactggcgatctgaagcctctgttcgacactctgaagggcgatcctgacccaaactctcacagaagcctgtccaaggaggcactggcttcactggagaaggtggaaacagccatcgcagaacagtttgtgacccatattaactattctctgccactgatcttcctgattttcaacaccgctctgactcctacaggtctgttctggcaggacaatccaatcatgtggattcacctgcccgccagccctaagaaggtgctgctgccctactatgatgctatcgccgacctgatcattctgggtagggatcatagcaagaagtactttgggatcgagccatccacaatcattcagccctattcaaagtctcagattgactggctgatgcagaataccgaaatgtggcctatcgcatgcgcttcattcgtgggcattctggataaccactaccctccaaataagctgattcagttttgtaagctgcataccttcgtgtttcctcagatcatttctaagactccactgaacaatgccctgctggtgttcacagacggatcatctaccggcatggccgcatataccctgactgatacaaccatcaagtttcagactaacctgaatagcgcacagctggtggaactgcaggctctgattgccgtgctgtccgctttcccaaaccagcccctgaatatctacacagactcagcatatctggctcactctattcccctgctggagacagtggcacagatcaagcatattagcgaaaccgctaagctgttcctgcagtgccagcagctgatctacaacagatcaatccctttttatatcggtcacgtgagggcccattctggtctgccagggcccattgcacaggggaatcagagggccgatctggcaactaagatcgtggcttccaacattaataca

SEQ ID NO: 200 - DNA, 1755 bp, Synthetic construct
  source 1..1755: mol_type = other DNA
ctgaccgctgccatcgacattctggctccccagcagtgcgccgagcctatcacctggaagtcagatgaaccagtgtgggtggaccagtggccactgactaacgataagctggcagctgcccagcagctggtgcaggagcagctggaagccggacacattactgagtctagctccccttggaacacaccaatctttgtgattaagaagaagtctggcaagtggagactgctgcaggacctgagggccgtgaatgcaacaatggtgctgatgggtgctctgcagccaggactgccatcccctgtggcaatcccccagggttacctgaagattatcattgatctgaaggactgtttctttagcattcctctgcatccatccgatcagaagagattcgctttctctctgccctccaccaacttcaaggaacctatgcagaggtttcagtggaaggtgctgccacaggggatggctaattcccccaccctgtgccagaagtatgtggctactgccatccacaaggtgagacatgcctggaagcagatgtacatcattcactatatggatgacatcctgattgcaggaaaggacggccagcaggtgctgcagtgtttcgatcagctgaagcaggagctgactgcagctggactgcatattgcccccgaaaaggtgcagctgcaggacccttacacttatctgggattcgagctgaacggcccaaagatcacaaatcagaaggcagtgattagaaaggataagctgcagaccctgaacgactttcagaagctgctgggaaagattaactggctgaggcccttcctgaagctgaccactggcgatctgaagcctctgttcgacactctgaagggcgattcagacccaaactctcacagaagcctgtccaaggaggcactggcttcactggagaaggtggaaacagccatcgcagaacagtttgtgacccatattaactattctctgccactgatcttcctgattttcaacaccgctctgactcctacaggtctgttctggcaggacaatccaatcatgtggattcacctgcccgccagccctaagaaggtgctgctgccctactatgatgctatcgccgacctgatcattctgggtagggatcatagcaagaagtactttgggatcgagccatccacaatcattcagccctattcaaagtctcagattgactggctgatgcagaataccgaaatgtggcctatcgcatgcgcttcattcgtgggcattctggataaccactaccctccaaataagctgattcagttttgtaagctgcataccttcgtgtttcctcagatcatttctaagactccactgaacaatgccctgctggtgttcacagacggatcatctaccggcatggccgcatataccctgactgatacaaccatcaagtttcagactaacctgaatagcgcacagctggtggaactgcaggctctgattgccgtgctgtccgctttcccaaaccagcccctgaatatctacacagactcagcatatctggctcactctattcccctgctggagacagtggcacagatcaagcatattagcgaatgggctaagctgttcctgcagtgccagcagctgatctacaacagatcaatccctttttatatcggtcacgtgagggcccattctggtctgccagggcccattgcacaggggaatcagagggccgatctggcaactaagatcgtggcttccaacattaataca

SEQ ID NO: 201 - DNA, 1755 bp, Synthetic construct
  source 1..1755: mol_type = other DNA
ctgaccgctgccatcgacattctggctccccagcagtgcgccgagcctatcacctggaagtcagatgaaccagtgtgggtggaccagtggccactgactaacgataagctggcagctgcccagcagctggtgcaggagcagctggaagccggacacattactgagtctagctccccttggaacacaccaatctttgtgattaagaagaagtctggcaagtggagactgctgcaggacctgagggccgtgaatgcaacaatggtgctgatgggtgctctgcagccaggactgccatcccctgtggcaatcccccagggttacctgaagattatcattgatctgaaggactgtttctttagcattcctctgcatccatccgatcagaagagattcgctttctctctgccctccaccaacttcaaggaacctatgcagaggtttcagtggaaggtgctgccacaggggatggctaattcccccaccctgtgccagaagtatgtggctactgccatccacaaggtgagacatgcctggaagcagatgtacatcattcactatatggatgacatcctgattgcaggaaaggacggccagcaggtgctgcagtgtttcgatcagctgaagcaggagctgactgcagctggactgcatattgcccccgaaaaggtgcagctgcaggacccttacacttatctgggattcgagctgaacggcccaaagatcacaaatcagaaggcagtgattagaaaggataagctgcagaccctgaacgactttcagaagctgctgggaaagattaactggctgaggcccttcctgaagctgaccactggcgatctgaagcctctgttcgacactctgaagggcgattcagacccaaactctcacagaagcctgtccaaggaggcactggcttcactggagaaggtggaaacagccatcgcagaacagtttgtgacccatattaactattctctgccactgatcttcctgattttcaacaccgctctgactcctacaggtctgttctggcaggacaatccaatcatgtggattcacctgcccgccagccctaagaaggtgctgctgccctactatgatgctatcgccgacctgatcattctgggtagggatcatagcaagaagtactttgggatcgagccatccacaatcattcagccctattcaaagtctcagattgactggctgatgcagaataccgaaatgtggcctatcgcatgcgcttcattcgtgggcattctggataaccactaccctccaaataagctgattcagttttgtaagctgcataccttcgtgtttcctcagatcatttctaagactccactgaacaatgccctgctggtgttcacagacggatcatctaccggcatggccgcatataccctgactgatacaaccatcaagtttcagactaacctgaatagcgcacagctggtggaactgcaggctctgattgccgtgctgtccgctttcccaaaccagcccctgaatatctacacagactcagcatatctggctcactctattcccctgctggagacagtggcacagatcaagcatattagcgaaaccgctaagtggttcctgcagtgccagcagctgatctacaacagatcaatccctttttatatcggtcacgtgagggcccattctggtctgccagggcccattgcacaggggaatcagagggccgatctggcaactaagatcgtggcttccaacattaataca

SEQ ID NO: 202 - DNA, 1755 bp, Synthetic construct
  source 1..1755: mol_type = other DNA
ctgaccgctgccatcgacattctggctccccagcagtgcgccgagcctatcacctggaagtcagatgaaccagtgtgggtggaccagtggccactgactaacgataagctggcagctgcccagcagctggtgcaggagcagctggaagccggacacattactgagtctagctccccttggaacacaccaatctttgtgattaagaagaagtctggcaagtggagactgctgcaggacctgagggccgtgaatgcaacaatggtgctgatgggtgctctgcagccaggactgccatcccctgtggcaatcccccagggttacctgaagattatcattgatctgaaggactgtttctttagcattcctctgcatccatccgatcagaagagattcgctttctctctgccctccaccaacttcaaggaacctatgcagaggtttcagtggaaggtgctgccacaggggatggctaattcccccaccctgtgcaacaagtatgtggctactgccatccacaaggtgagacatgcctggaagcagatgtacatcattcactatatggatgacatcctgattgcaggaaaggacggccagcaggtgctgcagtgtttcgatcagctgaagcaggagctgactgcagctggactgcatattgcccccgaaaaggtgcagctgcaggacccttacacttatctgggattcgagctgaacggcccaaagatcacaaatcagaaggcagtgattagaaaggataagctgcagaccctgaacgactttcagaagctgctgggaaagattaactggctgaggcccttcctgaagctgaccactggcgatctgaagcctctgttcgacactctgaagcctgattcagacccaaactctcacagaagcctgtccaaggaggcactggcttcactggagaaggtggaaacagccatcgcagaacagtttgtgacccatattaactattctctgccactgatcttcctgattttcaacaccgctctgactcctacaggtctgttctggcaggacaatccaatcatgtggattcacctgcccgccagccctaagaaggtgctgctgccctactatgatgctatcgccgacctgatcattctgggtagggatcatagcaagaagtactttgggatcgagccatccacaatcattcagccctattcaaagtctcagattgactggctgatgcagaataccgaaatgtggcctatcgcatgcgcttcattcgtgggcattctggataaccactaccctccaaataagctgattcagttttgtaagctgcataccttcgtgtttcctcagatcatttctaagactccactgaacaatgccctgctggtgttcacagacggatcatctaccggcatggccgcatataccctgactgatacaaccatcaagtttcagactaacctgaatagcgcacagctggtggaactgcaggctctgattgccgtgctgtccgctttcccaaaccagcccctgaatatctacacagactcagcatatctggctcactctattcccctgctggagacagtggcacagatcaagcatattagcgaaaccgctaagctgttcctgcagtgccagcagctgatctacaacagatcaatccctttttatatcggtcacgtgagggcccattctggtctgccagggcccattgcacaggggaatcagagggccgatctggcaactaagatcgtggcttccaacattaataca

SEQ ID NO: 203 - DNA, 1755 bp, Synthetic construct
  source 1..1755: mol_type = other DNA
ctgaccgctgccatcgacattctggctccccagcagtgcgccgagcctatcacctggaagtcagatgaaccagtgtgggtggaccagtggccactgactaacgataagctggcagctgcccagcagctggtgcaggagcagctggaagccggacacattactgagtctagctccccttggaacacaccaatctttgtgattaagaagaagtctggcaagtggagactgctgcaggacctgagggccgtgaatgcaacaatggtgctgatgggtgctctgcagccaggactgccatcccctgtggcaatcccccagggttacctgaagattatcattgatctgaaggactgtttctttagcattcctctgcatccatccgatcagaagagattcgctttctctctgccctccaccaacttcaaggaacctatgcagaggtttcagtggaaggtgctgccacaggggatggctaattcccccaccctgtgcaacaagtatgtggctactgccatccacaaggtgagacatgcctggaagcagatgtacatcattcactatatggatgacatcctgattgcaggaaaggacggccagcaggtgctgcagtgtttcgatcagctgaagcaggagctgactgcagctggactgcatattgcccccgaaaaggtgcagctgcaggacccttacacttatctgggattcgagctgaacggcccaaagatcacaaatcagaaggcagtgattagaaaggataagctgcagaccctgaacgactttcagaagctgctgggaaagattaactggctgaggcccttcctgaagctgaccactggcgatctgaagcctctgttcgacactctgaagggcgatcctgacccaaactctcacagaagcctgtccaaggaggcactggcttcactggagaaggtggaaacagccatcgcagaacagtttgtgacccatattaactattctctgccactgatcttcctgattttcaacaccgctctgactcctacaggtctgttctggcaggacaatccaatcatgtggattcacctgcccgccagccctaagaaggtgctgctgccctactatgatgctatcgccgacctgatcattctgggtagggatcatagcaagaagtactttgggatcgagccatccacaatcattcagccctattcaaagtctcagattgactggctgatgcagaataccgaaatgtggcctatcgcatgcgcttcattcgtgggcattctggataaccactaccctccaaataagctgattcagttttgtaagctgcataccttcgtgtttcctcagatcatttctaagactccactgaacaatgccctgctggtgttcacagacggatcatctaccggcatggccgcatataccctgactgatacaaccatcaagtttcagactaacctgaatagcgcacagctggtggaactgcaggctctgattgccgtgctgtccgctttcccaaaccagcccctgaatatctacacagactcagcatatctggctcactctattcccctgctggagacagtggcacagatcaagcatattagcgaaaccgctaagctgttcctgcagtgccagcagctgatctacaacagatcaatccctttttatatcggtcacgtgagggcccattctggtctgccagggcccattgcacaggggaatcagagggccgatctggcaactaagatcgtggcttccaacattaataca

SEQ ID NO: 204 - DNA, 1755 bp, Synthetic construct
  source 1..1755: mol_type = other DNA
ctgaccgctgccatcgacattctggctccccagcagtgcgccgagcctatcacctggaagtcagatgaaccagtgtgggtggaccagtggccactgactaacgataagctggcagctgcccagcagctggtgcaggagcagctggaagccggacacattactgagtctagctccccttggaacacaccaatctttgtgattaagaagaagtctggcaagtggagactgctgcaggacctgagggccgtgaatgcaacaatggtgctgatgggtgctctgcagccaggactgccatcccctgtggcaatcccccagggttacctgaagattatcattgatctgaaggactgtttctttagcattcctctgcatccatccgatcagaagagattcgctttctctctgccctccaccaacttcaaggaacctatgcagaggtttcagtggaaggtgctgccacaggggatggctaattcccccaccctgtgcaacaagtatgtggctactgccatccacaaggtgagacatgcctggaagcagatgtacatcattcactatatggatgacatcctgattgcaggaaaggacggccagcaggtgctgcagtgtttcgatcagctgaagcaggagctgactgcagctggactgcatattgcccccgaaaaggtgcagctgcaggacccttacacttatctgggattcgagctgaacggcccaaagatcacaaatcagaaggcagtgattagaaaggataagctgcagaccctgaacgactttcagaagctgctgggaaagattaactggctgaggcccttcctgaagctgaccactggcgatctgaagcctctgttcgacactctgaagggcgattcagacccaaactctcacagaagcctgtccaaggaggcactggcttcactggagaaggtggaaacagccatcgcagaacagtttgtgacccatattaactattctctgccactgatcttcctgattttcaacaccgctctgactcctacaggtctgttctggcaggacaatccaatcatgtggattcacctgcccgccagccctaagaaggtgctgctgccctactatgatgctatcgccgacctgatcattctgggtagggatcatagcaagaagtactttgggatcgagccatccacaatcattcagccctattcaaagtctcagattgactggctgatgcagaataccgaaatgtggcctatcgcatgcgcttcattcgtgggcattctggataaccactaccctccaaataagctgattcagttttgtaagctgcataccttcgtgtttcctcagatcatttctaagactccactgaacaatgccctgctggtgttcacagacggatcatctaccggcatggccgcatataccctgactgatacaaccatcaagtttcagactaacctgaatagcgcacagctggtggaactgcaggctctgattgccgtgctgtccgctttcccaaaccagcccctgaatatctacacagactcagcatatctggctcactctattcccctgctggagacagtggcacagatcaagcatattagcgaatgggctaagctgttcctgcagtgccagcagctgatctacaacagatcaatccctttttatatcggtcacgtgagggcccattctggtctgccagggcccattgcacaggggaatcagagggccgatctggcaactaagatcgtggcttccaacattaataca

SEQ ID NO: 205 - DNA, 1755 bp, Synthetic construct
  source 1..1755: mol_type = other DNA
ctgaccgctgccatcgacattctggctccccagcagtgcgccgagcctatcacctggaagtcagatgaaccagtgtgggtggaccagtggccactgactaacgataagctggcagctgcccagcagctggtgcaggagcagctggaagccggacacattactgagtctagctccccttggaacacaccaatctttgtgattaagaagaagtctggcaagtggagactgctgcaggacctgagggccgtgaatgcaacaatggtgctgatgggtgctctgcagccaggactgccatcccctgtggcaatcccccagggttacctgaagattatcattgatctgaaggactgtttctttagcattcctctgcatccatccgatcagaagagattcgctttctctctgccctccaccaacttcaaggaacctatgcagaggtttcagtggaaggtgctgccacaggggatggctaattcccccaccctgtgcaacaagtatgtggctactgccatccacaaggtgagacatgcctggaagcagatgtacatcattcactatatggatgacatcctgattgcaggaaaggacggccagcaggtgctgcagtgtttcgatcagctgaagcaggagctgactgcagctggactgcatattgcccccgaaaaggtgcagctgcaggacccttacacttatctgggattcgagctgaacggcccaaagatcacaaatcagaaggcagtgattagaaaggataagctgcagaccctgaacgactttcagaagctgctgggaaagattaactggctgaggcccttcctgaagctgaccactggcgatctgaagcctctgttcgacactctgaagggcgattcagacccaaactctcacagaagcctgtccaaggaggcactggcttcactggagaaggtggaaacagccatcgcagaacagtttgtgacccatattaactattctctgccactgatcttcctgattttcaacaccgctctgactcctacaggtctgttctggcaggacaatccaatcatgtggattcacctgcccgccagccctaagaaggtgctgctgccctactatgatgctatcgccgacctgatcattctgggtagggatcatagcaagaagtactttgggatcgagccatccacaatcattcagccctattcaaagtctcagattgactggctgatgcagaataccgaaatgtggcctatcgcatgcgcttcattcgtgggcattctggataaccactaccctccaaataagctgattcagttttgtaagctgcataccttcgtgtttcctcagatcatttctaagactccactgaacaatgccctgctggtgttcacagacggatcatctaccggcatggccgcatataccctgactgatacaaccatcaagtttcagactaacctgaatagcgcacagctggtggaactgcaggctctgattgccgtgctgtccgctttcccaaaccagcccctgaatatctacacagactcagcatatctggctcactctattcccctgctggagacagtggcacagatcaagcatattagcgaaaccgctaagtggttcctgcagtgccagcagctgatctacaacagatcaatccctttttatatcggtcacgtgagggcccattctggtctgccagggcccattgcacaggggaatcagagggccgatctggcaactaagatcgtggcttccaacattaataca

SEQ ID NO: 206 - DNA, 1755 bp, Synthetic construct
  source 1..1755: mol_type = other DNA
ctgaccgctgccatcgacattctggctccccagcagtgcgccgagcctatcacctggaagtcagatgaaccagtgtgggtggaccagtggccactgactaacgataagctggcagctgcccagcagctggtgcaggagcagctggaagccggacacattactgagtctagctccccttggaacacaccaatctttgtgattaagaagaagtctggcaagtggagactgctgcaggacctgagggccgtgaatgcaacaatggtgctgatgggtgctctgcagccaggactgccatcccctgtggcaatcccccagggttacctgaagattatcattgatctgaaggactgtttctttagcattcctctgcatccatccgatcagaagagattcgctttctctctgccctccaccaacttcaaggaacctatgcagaggtttcagtggaaggtgctgccacaggggatggctaattcccccaccctgtgcaacaagtatgtggctactgccatccacaaggtgagacatgcctggaagcagatgtacatcattcactatatggatgacatcctgattgcaggaaaggacggccagcaggtgctgcagtgtttcgatcagctgaagcaggagctgactgcagctggactgcatattgcccccgaaaaggtgcagctgcaggacccttacacttatctgggattcgagctgaacggcccaaagatcacaaatcagaaggcagtgattagaaaggataagctgcagaccctgaacgactttcagaagctgctgggaaagattaactggctgaggcccttcctgaagctgaccactggcgatctgaagcctctgttcgacactctgaagcctgattcagacccaaactctcacagaagcctgtccaaggaggcactggcttcactggagaaggtggaaacagccatcgcagaacagtttgtgacccatattaactattctctgccactgatcttcctgattttcaacaccgctctgactcctacaggtctgttctggcaggacaatccaatcatgtggattcacctgcccgccagccctaagaaggtgctgctgccctactatgatgctatcgccgacctgatcattctgggtagggatcatagcaagaagtactttgggatcgagccatccacaatcattcagccctattcaaagtctcagattgactggctgatgcagaataccgaaatgtggcctatcgcatgcgcttcattcgtgggcattctggataaccactaccctccaaataagctgattcagttttgtaagctgcataccttcgtgtttcctcagatcatttctaagactccactgaacaatgccctgctggtgttcacagacggatcatctaccggcatggccgcatataccctgactgatacaaccatcaagtttcagactaacctgaatagcgcacagctggtggaactgcaggctctgattgccgtgctgtccgctttcccaaaccagcccctgaatatctacacagactcagcatatctggctcactctattcccctgctggagacagtggcacagatcaagcatattagcgaatgggctaagctgttcctgcagtgccagcagctgatctacaacagatcaatccctttttatatcggtcacgtgagggcccattctggtctgccagggcccattgcacaggggaatcagagggccgatctggcaactaagatcgtggcttccaacattaataca

SEQ ID NO: 207 - DNA, 1755 bp, Synthetic construct
  source 1..1755: mol_type = other DNA
ctgaccgctgccatcgacattctggctccccagcagtgcgccgagcctatcacctggaagtcagatgaaccagtgtgggtggaccagtggccactgactaacgataagctggcagctgcccagcagctggtgcaggagcagctggaagccggacacattactgagtctagctccccttggaacacaccaatctttgtgattaagaagaagtctggcaagtggagactgctgcaggacctgagggccgtgaatgcaacaatggtgctgatgggtgctctgcagccaggactgccatcccctgtggcaatcccccagggttacctgaagattatcattgatctgaaggactgtttctttagcattcctctgcatccatccgatcagaagagattcgctttctctctgccctccaccaacttcaaggaacctatgcagaggtttcagtggaaggtgctgccacaggggatggctaattcccccaccctgtgcaacaagtatgtggctactgccatccacaaggtgagacatgcctggaagcagatgtacatcattcactatatggatgacatcctgattgcaggaaaggacggccagcaggtgctgcagtgtttcgatcagctgaagcaggagctgactgcagctggactgcatattgcccccgaaaaggtgcagctgcaggacccttacacttatctgggattcgagctgaacggcccaaagatcacaaatcagaaggcagtgattagaaaggataagctgcagaccctgaacgactttcagaagctgctgggaaagattaactggctgaggcccttcctgaagctgaccactggcgatctgaagcctctgttcgacactctgaagcctgattcagacccaaactctcacagaagcctgtccaaggaggcactggcttcactggagaaggtggaaacagccatcgcagaacagtttgtgacccatattaactattctctgccactgatcttcctgattttcaacaccgctctgactcctacaggtctgttctggcaggacaatccaatcatgtggattcacctgcccgccagccctaagaaggtgctgctgccctactatgatgctatcgccgacctgatcattctgggtagggatcatagcaagaagtactttgggatcgagccatccacaatcattcagccctattcaaagtctcagattgactggctgatgcagaataccgaaatgtggcctatcgcatgcgcttcattcgtgggcattctggataaccactaccctccaaataagctgattcagttttgtaagctgcataccttcgtgtttcctcagatcatttctaagactccactgaacaatgccctgctggtgttcacagacggatcatctaccggcatggccgcatataccctgactgatacaaccatcaagtttcagactaacctgaatagcgcacagctggtggaactgcaggctctgattgccgtgctgtccgctttcccaaaccagcccctgaatatctacacagactcagcatatctggctcactctattcccctgctggagacagtggcacagatcaagcatattagcgaaaccgctaagtggttcctgcagtgccagcagctgatctacaacagatcaatccctttttatatcggtcacgtgagggcccattctggtctgccagggcccattgcacaggggaatcagagggccgatctggcaactaagatcgtggcttccaacattaataca

SEQ ID NO: 208 - DNA, 1755 bp, Synthetic construct
  source 1..1755: mol_type = other DNA
ctgaccgctgccatcgacattctggctccccagcagtgcgccgagcctatcacctggaagtcagatgaaccagtgtgggtggaccagtggccactgactaacgataagctggcagctgcccagcagctggtgcaggagcagctggaagccggacacattactgagtctagctccccttggaacacaccaatctttgtgattaagaagaagtctggcaagtggagactgctgcaggacctgagggccgtgaatgcaacaatggtgctgatgggtgctctgcagccaggactgccatcccctgtggcaatcccccagggttacctgaagattatcattgatctgaaggactgtttctttagcattcctctgcatccatccgatcagaagagattcgctttctctctgccctccaccaacttcaaggaacctatgcagaggtttcagtggaaggtgctgccacaggggatggctaattcccccaccctgtgcaacaagtatgtggctactgccatccacaaggtgagacatgcctggaagcagatgtacatcattcactatatggatgacatcctgattgcaggaaaggacggccagcaggtgctgcagtgtttcgatcagctgaagcaggagctgactgcagctggactgcatattgcccccgaaaaggtgcagctgcaggacccttacacttatctgggattcgagctgaacggcccaaagatcacaaatcagaaggcagtgattagaaaggataagctgcagaccctgaacgactttcagaagctgctgggaaagattaactggctgaggcccttcctgaagctgaccactggcgatctgaagcctctgttcgacactctgaagggcgatcctgacccaaactctcacagaagcctgtccaaggaggcactggcttcactggagaaggtggaaacagccatcgcagaacagtttgtgacccatattaactattctctgccactgatcttcctgattttcaacaccgctctgactcctacaggtctgttctggcaggacaatccaatcatgtggattcacctgcccgccagccctaagaaggtgctgctgccctactatgatgctatcgccgacctgatcattctgggtagggatcatagcaagaagtactttgggatcgagccatccacaatcattcagccctattcaaagtctcagattgactggctgatgcagaataccgaaatgtggcctatcgcatgcgcttcattcgtgggcattctggataaccactaccctccaaataagctgattcagttttgtaagctgcataccttcgtgtttcctcagatcatttctaagactccactgaacaatgccctgctggtgttcacagacggatcatctaccggcatggccgcatataccctgactgatacaaccatcaagtttcagactaacctgaatagcgcacagctggtggaactgcaggctctgattgccgtgctgtccgctttcccaaaccagcccctgaatatctacacagactcagcatatctggctcactctattcccctgctggagacagtggcacagatcaagcatattagcgaatgggctaagctgttcctgcagtgccagcagctgatctacaacagatcaatccctttttatatcggtcacgtgagggcccattctggtctgccagggcccattgcacaggggaatcagagggccgatctggcaactaagatcgtggcttccaacattaataca

SEQ ID NO: 209 - DNA, 1755 bp, Synthetic construct
  source 1..1755: mol_type = other DNA
ctgaccgctgccatcgacattctggctccccagcagtgcgccgagcctatcacctggaagtcagatgaaccagtgtgggtggaccagtggccactgactaacgataagctggcagctgcccagcagctggtgcaggagcagctggaagccggacacattactgagtctagctccccttggaacacaccaatctttgtgattaagaagaagtctggcaagtggagactgctgcaggacctgagggccgtgaatgcaacaatggtgctgatgggtgctctgcagccaggactgccatcccctgtggcaatcccccagggttacctgaagattatcattgatctgaaggactgtttctttagcattcctctgcatccatccgatcagaagagattcgctttctctctgccctccaccaacttcaaggaacctatgcagaggtttcagtggaaggtgctgccacaggggatggctaattcccccaccctgtgcaacaagtatgtggctactgccatccacaaggtgagacatgcctggaagcagatgtacatcattcactatatggatgacatcctgattgcaggaaaggacggccagcaggtgctgcagtgtttcgatcagctgaagcaggagctgactgcagctggactgcatattgcccccgaaaaggtgcagctgcaggacccttacacttatctgggattcgagctgaacggcccaaagatcacaaatcagaaggcagtgattagaaaggataagctgcagaccctgaacgactttcagaagctgctgggaaagattaactggctgaggcccttcctgaagctgaccactggcgatctgaagcctctgttcgacactctgaagggcgatcctgacccaaactctcacagaagcctgtccaaggaggcactggcttcactggagaaggtggaaacagccatcgcagaacagtttgtgacccatattaactattctctgccactgatcttcctgattttcaacaccgctctgactcctacaggtctgttctggcaggacaatccaatcatgtggattcacctgcccgccagccctaagaaggtgctgctgccctactatgatgctatcgccgacctgatcattctgggtagggatcatagcaagaagtactttgggatcgagccatccacaatcattcagccctattcaaagtctcagattgactggctgatgcagaataccgaaatgtggcctatcgcatgcgcttcattcgtgggcattctggataaccactaccctccaaataagctgattcagttttgtaagctgcataccttcgtgtttcctcagatcatttctaagactccactgaacaatgccctgctggtgttcacagacggatcatctaccggcatggccgcatataccctgactgatacaaccatcaagtttcagactaacctgaatagcgcacagctggtggaactgcaggctctgattgccgtgctgtccgctttcccaaaccagcccctgaatatctacacagactcagcatatctggctcactctattcccctgctggagacagtggcacagatcaagcatattagcgaaaccgctaagtggttcctgcagtgccagcagctgatctacaacagatcaatccctttttatatcggtcacgtgagggcccattctggtctgccagggcccattgcacaggggaatcagagggccgatctggcaactaagatcgtggcttccaacattaataca

SEQ ID NO: 210 - DNA, 1731 bp, Synthetic construct
  source 1..1731: mol_type = other DNA
atgattggcgccatcgagtccaacctgtttgcagatcagatttcttggaagtcagaccagcccgtgtggctgaatcagtggcctctgaagcaggagaagctgcaggctctgcagcagctggtgaccgaacagctgcagctgggccacctggaggaatctaacagcccctggaatactccagtgttcgtgattaagaagaagtctggaaagtggagactgctgcaggatctgagggcagtgaatgctaccatgcatgacatgggggctctgcagcctggactgccatctcctgtggccgtgcccaagggatgggagattatcattatcgatctgcaggactgcttctttaacatcaagctgcaccctgaagattgtaagagattcgccttttctgtgcccagccctaatttcaagagaccatatcagaggtttcagtggaaggtgctgccacagggtatgaagaactcccccacactgtgcaacaagtttgtggataaggcaattctgaccgtgagagacaagtaccaggactcatatattgtgcactacatggatgacatcctgctggcccatccttccaggtcaattgtggacgagatcctgacttccatgatccaggcactgaacaagcacgggctggtggtgtcaactgaaaagatccagaagtacgataatctgaagtacctgggcacacatatccagggtgacgccgtgtcataccagaagctgcagattagaactgataagctgaggacactgaacgacttccagaagctgctgggaaagattaattggatcagacccttcctgaagctgaccactggggagctgaagcctctgtttgaaatcctgaacggagattccaatcccatttcaatcaggaagctgacacctgaggcctgcaaggcactgcagctggtgaacgagagactgtctatcgctcgtgtgaagagactggatctgtctcggccttggagcctgtgcattctgaagaccgagtatactcccacagcctgtctgtggcagaacggagtgctggagtggattcacctgccacatatcagccccaaagtgattacaccttacgatattttctgcacccagctgattatcaagggaagacataggtccaaggagctgttttcaaaggaccctgactatatcgtggtgccatacaccaaggtgcagttcgatctgctgctgcaggagaaggaagactggccaatttccctgctgggattcctgggcgaggtgcactttcatctgcctaaggaccctctgctgaccttcactctgcagactgcaattatctttcctcacatgacatcaacaaccccactggaaaaggggattgtgatctttaccgacggctctgctaatggtagaagcgtgacttatatccagggaagggagccaattatcaaggaaaacactcagaatacagctcagcaggccgaaattgtggcagtgatcactgctttcgaggaagtgtctcagagctttaacctgtataccgattctaagtatgtgactggtctgtttcctgagattgaaacagctaccctgagcccaagaaccaaaatctacactgagctgagacacctgcagaggctgattcataagagacaggaaaagttctacattggccacatcaggggtcatacagggctgccaggacccctggcacagggtaatgcttacgccgactccctgacaaggattctgaccgct

SEQ ID NO: 211 - DNA, 1731 bp, Synthetic construct
  source 1..1731: mol_type = other DNA
atgattggcgccatcgagtccaacctgtttgcagatcagatttcttggaagtcagaccagcccgtgtggctgaatcagtggcctctgaagcaggagaagctgcaggctctgcagcagctggtgaccgaacagctgcagctgggccacctggaggaatctaacagcccctggaatactccagtgttcgtgattaagaagaagtctggaaagtggagactgctgcaggatctgagggcagtgaatgctaccatgcatgacatgggggctctgcagcctggactgccatctcctgtggccgtgcccaagggatgggagattatcattatcgatctgcaggactgcttctttaacatcaagctgcaccctgaagattgtaagagattcgccttttctgtgcccagccctaatttcaagagaccatatcagaggtttcagtggaaggtgctgccacagggtatgaagaactcccccacactgtgcaacaagtttgtggataaggcaattctgaccgtgagagacaagtaccaggactcatatattgtgcactacatggatgacatcctgctggcccatccttccaggtcaattgtggacgagatcctgacttccatgatccaggcactgaacaagcacgggctggtggtgtcaactgaaaagatccagaagtacgataatctgaagtacctgggcacacatatccagggtgacgccgtgtcataccagaagctgcagattagaactgataagctgaggacactgaacgacttccagaagctgctgggaaagattaattggatcagacccttcctgaagctgaccactggggagctgaagcctctgtttgaaatcctgaacggagattccaatcccatttcaatcaggaagctgacacctgaggcctgcaaggcactgcagctggtgaacgagagactgtctatcgctcgtgtgaagagactggatctgtctcggccttggagcctgtgcattctgaagaccgagtatactcccacagcctgtctgtggcagaacggagtgctggagtggattcacctgccacatatcagccccaaagtgattacaccttacgatattttctgcacccagctgattatcaagggaagacataggtccaaggagctgttttcaaaggaccctgactatatcgtggtgccatacaccaaggtgcagttcgatctgctgctgcaggagaaggaagactggccaatttccctgctgggattcctgggcgaggtgcactttcatctgcctaaggaccctctgctgaccttcactctgcagactgcaattatctttcctcacatgacatcaacaaccccactggaaaaggggattgtgatctttaccgacggctctgctaatggtagaagcgtgacttatatccagggaagggagccaattatcaaggaaaacactcagaatacagctcagcaggccgaaattgtggcagtgatcactgctttcgaggaagtgtctcagagctttaacctgtataccgattctaagtatgtgactggtctgtttcctgagattgaaacagctaccctgagcccaagaaccaaatggtacactgagctgagacacctgcagaggctgattcataagagacaggaaaagttctacattggccacatcaggggtcatacagggctgccaggacccctggcacagggtaatgcttacgccgactccctgacaaggattctgaccgct

SEQ ID NO: 212 - DNA, 1488 bp, Synthetic construct
  source 1..1488: mol_type = other DNA
acacttaatattgaggatgaacatagattgcacgagacctctaaggaacctgatgtttctcttggatcaacttggttgtcagatttcccacaagcatgggcagagaccggaggtatgggtcttgctgttaggcaggcaccacttattattcctttgaaggcaacctctactcctgtgtcaattaagcaatatccaatgtctcaggaagctaggcttggaattaagcctcacattcaaagacttttggatcagggtattttggtgccatgtcaatcaccttggaacacaccacttttgcctgttaagaagcctggaactaatgattacagaccagtgcaagatttgagggaggttaacaagagagtggaagatattcacccaactgttccaaacccttataatcttttgtctggattgccaccttcacatcaatggtacactgtgcttgatttgaaggatgcatttttctgccttaggttgcatccaacatctcagcctctttttgctttcgagtggagagatcctgaaatgggaatttctggtcaacttacatggaccaggttgcctcagggtttcaagaactcaccaaccttgtttaatgaggcacttcacagggatttggctgattttaggattcaacatcctgatcttatccttttgcagtatgttgatgatcttttgcttgctgcaacttctgaattggattgtcaacagggaactagggcattgcttcaaacacttggaaatttgggttacagagcttcagcaaagaaggctcagatttgccaaaagcaggttaagtatcttggatacttgcttaaggaaggacaaaggtggttgaccgaggctagaaaggaaactgtgatgggtcaaccaacacctaagacccctaggcagcttagagagttcttgggaaaggcaggtttttgtaggcttttcattccaggatttgctgaaatggctgcaccactttatcctttgaccaagcctggaactttgtttaactggggtccagatcaacagaaggcataccaagaaattaagcaggctttgcttactgctccagcacttggtttgcctgatcttacaaagccatttgagttgttcgttgatgaaaagcaaggatatgcaaagggtgtgcttacccagaagttgggaccttggagaaggcctgttgcttacctttctaagaaacttgatccagtggctgcaggttggccaccttgtcttagaatggttgctgcaattgcagtgcttacaaaggatgctggaaagttgactatgggacaacctcttgttattttggcaccacacgctgttgaggcacttgtgaagcagccacctgataggtggttgtcaaacgcaagaatgacccattatcaagctcttcttttggatactgatagggtgcagttcggtcctgttgtggctttgaatccagcaacacttttgccacttcctgaggaaggattgcaacacaactgcctt

SEQ ID NO: 213 - DNA, 1488 bp, Synthetic construct
  source 1..1488: mol_type = other DNA
accctgaatattgaggatgaatacagactgcatgagacctctaaggaacccgatgtgagcctgggaagcacttggctgagcgacttccctcaggcatgggctgagactggaggcatgggcctggccgtgaggcaggcacctctgattatcctgctgaaggccacatccaccccagtgtcaattaagcagtaccccatgaggcagaaggcaagactgggaattaagccacacatccagagactgctggatcagggcatcctggtgccttgccagtccccttggaacacacccctgctgcctgtgaagaagcctggcaccaatgattataggccagtgcaggacctgagggaggtgaacaagagagtggaagacattcatcctaccgtgcctaacccatacaatctgctgtctggtctgcctccaagccaccagtggtatactgtgctggatctgaaggacgcattcttttgtctgaggctgcatcccacatcacagcctctgttcgcttttgagtggagagatcccgaaatgggaatctccggccagctgacttggacaaggctgccccagggtttcaagaactcacctgccctgtttgatgaggcactgagaagggatctggccgatttcaggattcagcacccagacctgatcctgctgcagtatgtggatgacctgctgctggctgccacctccgaactggattgccagcagggaactagggcactgctgcagacactgggtgacctggggtatagagcctcagcaaagaaggctcagatttgtcagaagcaggtgaagtacctgggttatctgctgaaggaggggcagaggtggctgaccgaggctagaaaggaaactgtgatggggcagcccacacctaagaccccaaggcagctgagaaagttcctgggaactgctggcaattgcaggctgttcattcccggatttgccgagatggcagctccactgtaccccctgaccaagccaggaactctgtttaactggggccccgaccagcagaaggcatatcaggaaatcaagcaggctctgctgactgctcctgccctgggcctgcctgatctgacaaagcccttcgagctgtttgtggacgaaaagcagggttacgctaagggggtgctgacccagaagctgggtccttggagaaggcccgtggcctatctgtctaagaagctggaccctgtggctgcaggatggcccccttgcctgagaatggtggctgccattgctgtgctgacaaaggacgccggaaagctgactatgggacagcctctggttattggggcaccacatgctgtggaagccctggtgaagcagccacccgataggtggctgagcaaggccagaatgacccactaccaggcactgctgctggatactgacagggtgcagttcggccccgtggtggctctgaatcctgccactctgctgccactgcccgaggaaggtctgcagcataactgtctg

SEQ ID NO: 214 - DNA, 1488 bp, Synthetic construct
  source 1..1488: mol_type = other DNA
accgtgtccctgcaggatgagcacagactgttcgacatccctgtgaccacttcactgccagacgtgtggctgcaggactttcctcaggcttgggctgaaaccggaggcctgggtagggcaaagtgccaggcaccaattatcattgatctgaagcctactgccgtgccagtgtctatcaagcagtaccctatgagcctggaggcacacatgggtattagacagcatatcattaagttcctggaactgggggtgctgagaccctgtaggtctccttggaacacacccctgctgcctgtgaagaagccaggaacccaggattacaggcccgtgcaggacctgagggagatcaataagagaacagtggatattcatcctaccgtgcccaacccttataatctgctgtccaccctgaagccagactactcatggtatactgtgctggatctgaaggacgctttcttttgcctgcctctggctcctcagagccaggagctgttcgctttcgagtggaaggaccctgagagaggtatctctgggcagctgacatggaccaggctgcctcagggattcaagaatagcccaaccctgtttgacgaggccctgcacagggatctgactgacttcagaacacagcatccagaagtgacactgctgcagtatgtggatgacctgctgctggctgcccccaccaagaaggcatgcactcagggcacaagacacctgctgcaggagctgggagaaaagggctatagggcatccgctaagaaggctcagatttgccagaccaaagtgacttacctgggttatattctgtcagaggggaagaggtggctgactcccggaagaatcgaaacagtggctaggattcctccacccagaaaccctagggaggtgagagagttcctgggtacagccgggttttgtagactgtggattcccggctttgctgagctggcagctcctctgtatgccctgaccaaggaatccacacctttcacctggcagactgaacatcagctggcttttgaggccctgaagaaggctctgctgtctgcccctgcactgggactgccagatacaagcaagcccttcaccctgtttctggacgagagacagggaatcgcaaagggcgtgctgactcagaagctgggtccttggaagaggcccgtggcttacctgtctaagaagctggaccctgttgctgcaggatggcctccatgcctgaggattatggctgccaccgcaatgctggtgaaggactctgctaagctgactctgggtcagcccctgacagtgatcacccctcacactctggaggctattgtgaggcagccccctgatagatggatcactaatgccagactgacacattatcaggcactgctgctggatactgacagggtgcagtttgggccacccgtgaccctgaaccctgccactctgctgccagtgcccgaaaatcagccttccccacacgactgtagacag

SEQ ID NO: 215 - DNA, 1488 bp, Synthetic construct
  source 1..1488: mol_type = other DNA
ctggtgctgaacctggaggaagagtacagactgaacgagaagcctgtgcctccatccattgatccatcatggctgcagctgttccctatggtgtgggctgaaaaggccggtatggggctggccaatcaggtgccccctgtggtggtggagctgaagtctgatgccagccctgtggcagtgagacagtacccaatgtctaaggaagctagagagggtattaggcctcatatccagaggtttctggacctggggattctggtgccctgccagagcccttggaacaccccactgctgcccgtgaagaagcccggcactaatgattataggcctgtgcaggacctgagagaagtgaacaagagggtgcaggatattcacccaactgtgccaaacccctacaatctgctgtctagcctgccaccctctcatacatggtatagcgtgctggatctgaaggacgccttcttttgtctgaagctgcacccaaactcccagcccctgttcgctttcgagtggagagatcctgagaagggaaacaccggccagctgacttggacaaggctgccacagggattcaagaactctcccactctgtttgatgaggccctgcatagagacctggcttcattcagggccctgaatcctcaggttgtgatgctgcagtatgtggatgacctgctggtggctgccccaacctatagagactgcaaggaaggaactagaaggctgctgcaggagctgtccaagctgggctacagagtgtcagcaaagaaggctcagctgtgcagggaagaggtgacatacctgggttatctgctgaagggaggcaagagatggctgaccccagccaggaaggcaactgtgatgaagattcctacaccaaccactcccagacaggtgagggagttcctgggtactgcagggttttgcagactgtggattcctgggttcgcttccctggcagctcctctgtatccactgacaagagaaaaggtgcctttcacctggactgaagcacaccaggaggcttttggaaggattaaggaggctctgctgtcagctcccgccctggcactgcctgatctgaccaagccatttgccctgtatgtggatgaaaaggagggagtggcaaggggcgtgctgacacagaccctgggtccttggagaaggccagtggcttatctgtctaagaagctggaccctgttgccagcggatggccaacatgcctgaaggctatcgccgcagtggccctgctgctgaaggatgctgacaagctgaccctgggccagaacgtgctggttattgcccctcacaatctggaaagcatcgtgagacagcctccagacaggtggatgacaaatgcaagaatgacccattaccagtccctgctgctgaacgagagggtgtcattcgctccccctgccattctgaatcccgctactctgctgcctgtggaatctgatgacacaccaattcatatctgtagcgag

SEQ ID NO: 216 - DNA, 1488 bp, Synthetic construct
  source 1..1488: mol_type = other DNA
accctgaatattgaggatgaatacagactgcacgagacctccaagggacccgatgtgcctctgggctctacttggctgagcgacttccctcaggcatgggctgaaaccggaggcatgggcctggccgtgaggcaggcacccctgattatccctctgagagctgcctccactccagtgtctattaagcagtacccaatgtctagggaggccagactgggaattaagccacatatccagagactgctggatcagggcatcctggtgccatgccagagcccctggaacacaccactgctgcccgtgaagaagcccgggaccaatgattataggcctgtgcaggacctgagggaggtgaacaagagagtggaagacattcacccaaccgtgcctaacccatacaatctgctgtctggactgcctccaagccatcagtggtatactgtgctggatctgaaggacgcattcttttgtctgaggctgcaccccacatcccagtcactgttcgcttttgagtggagagaccctgaaatgggtatctccgggcagctgacatggaccaggctgccacagggcttcaagaactcacccacactgtttgatgaggcactgcacagggatctggctgatttcaggattcagcatcctgacctgatcctgctgcagtatgtggatgacctgctgctggcagctacctccgaactggattgccagcagggtactagggctctgctgcagacactgggagacctgggctatagagcctcagcaaagaaggcccagatttgccagaagcaggtgaagtacctgggttatctgctgaaggaggggcagaggtggctgaccgaggctagaaaggaaactgtgatgggccagcccacccctaagactccaaggcagctgagagagttcctgggaaccgctgggttttgcaggctgtggattcccggtttcgccgaaatggccgcacctctgtacccactgactaagacaggaaccctgtttaagtggggcccagatcagcagaaggcttatcaggaaatcaagcaggccctgctgactgctcccgccctgggtctgcctgatctgacaaagccattcgagctgtttgtggacgaaaagcagggatacgccaagggcgtgctgactcagaagctgggaccttggagaaggccagtggcatatctgtctaagaagctggaccctgtggctgctggatggcccccttgcctgagaatggtggcagctattgccgtgctgacaaaggacgcaggaaagctgactatgggacagcccctggttattctggcacctcacgctgtggaggccctggtgaagcagccacccgacaggtggctgagcaatgcaagaatgacccattaccaggctctgctgctggatactgacagggtgcagttcgggccaattgtgaccctgaaccctgccactctgctgccactgcctgaggaaggtctgcagcacgattgtctg

SEQ ID NO: 217 - DNA, 1497 bp, Synthetic construct
  source 1..1497: mol_type = other DNA
accgctcctctggaggaagagtacagactgttcctggaagcacctattcagaacgtgactctgctggagcagtggaagagggaaattcctaaagtgtgggccgagatcaatcctccaggactggcttccacacaggccccaattcacgtgcagctgctgtcaaccgccctgcccgtgagagtgaggcagtaccctatcacactggaggcaaagaggtctctgagggaaaccattagaaagtttagggctgccggaatcctgagacccgtgcacagcccttggaacactccactgctgcccgtgagaaagtccggcacatcagagtataggatggtgcaggatctgagagaggtgaacaagagggtggaaaccattcatcctactgtgccaaatccctacaccctgctgtctctgctgccccctgacagaatctggtatagcgtgctggatctgaaggacgctttcttttgcattcctctggccccagagtcccagctgatcttcgcctttgaatgggcagatgctgaagagggagagtctggccagctgacctggactaggctgccacagggattcaagaacagccccactctgtttgatgaagctctgaatagagacctgcagggcttcaggctggaccacccatctgtgagcctgctgcagtatgtggatgacctgctgattgcagctgatacacaggccgcatgcctgtccgccactagagacctgctgatgacactggcagagctgggttacagggtgtcagggaagaaggcccagctgtgccaggaagaagtgacttatctgggttttaagatccataaggggtccagatcactgtctaacagcaggacacaggctattctgcagatccctgtgccaaagaccaagagacaggtgagggagttcctgggtactattgggtactgtagactgtggattcctggttttgcagagctggctcagccactgtatgctgccacaaggggaggcaatgatcctctggtgtggggagagaaggaagaggaagcattccagtctctgaagctggctctgactcagccacccgccctggcactgccttccctggacaagccattccagctgtttgtggaggaaacctcaggagcagctaagggcgtgctgactcaggctctgggtccttggaagagacccgtggcctacctgtctaagagactggaccctgttgctgcaggatggccaagatgcctgagggcaatcgctgccgcagctctgctgaccagagaggcttctaagctgaccttcggacaggacattgaaatcacctctagccataacctggagtccctgctgagatcacctccagacaagtggctgacaaatgccaggattacccagtatcaggtgctgctgctggaccctcctagagtgagattcaagcagacagccgcactgaaccccgctaccctgctgcctgagaccgatgacactctgccaatccaccattgtctggat

SEQ ID NO: 218 - DNA, 1284 bp, Synthetic construct
  source 1..1284: mol_type = other DNA
cctatttctccaatcgagaccgtgcctgtgaagctgaagccaggcatggatggccccaaggtgaagcagtggccactgacagaggaaaagattaaggctctggtggagatttgcaccgagatggaaaaggagggaaagatttctaagattgggcccgaaaacccttacaataccccagtgttcgctattaagaagaaggattcaactaagtggagaaagctggtggacttcagagaactgaacaagaggactcaggacttttgggaagtgcagctgggcattcctcaccctgcaggactgaagaagaagaagtctgtgacagtgctggatgtgggagacgcttacttttcagtgccactggatgaagacttcagaaagtatacagcctttaccattccatctatcaacaatgagacccccggaattagataccagtataacgtgctgcctcagggttggaaggggagcccagcaattttccagtctagcatgactaagatcctggagccctttagaaagcagaatcctgatattgtgatctaccagtatatggatgacctgtatgtgggtagcgacctggaaattgggcagcacaggactaagatcgaggaactgagacagcatctgctgagatggggtctgaccactccagataagaagcaccagaaggaacctccattcctgtggatggggtacgagctgcatcccgacaagtggactgtgcagccaattgtgctgcccgagaaggattcttggacagtgaacgacatccagaagctggtgggaaagctgaattgggccagccaaatctaccccggcatcaaggtgagacagctgtgcaagctgctgaggggtactaaggcactgacagaagtgattcctctgaccgaggaagctgaactggagctggccgaaaacagggagatcctgaaggaacccgtgcacggcgtgtactatgatccttccaaggacctgattgctgagatccagaagcagggtcaggggcagtggacctaccaaatctaccaggaacctttcaagaacctgaagactggaaagtacgcaagaatgaggggcgctcataccaatgatgtgaagcagctgactgaagcagtgcagaagattacaaccgagtcaattgtgatctggggaaagacacctaagtttaagctgccaatccagaaggaaacttgggagacatggtggaccgagtattggcaggctacttggattcctgaatgggagttcgtgaatacaccccctctggtgaagctgtggtatcag

SEQ ID NO: 219 - DNA, 1722 bp, Synthetic construct
  source 1..1722: mol_type = other DNA
atgaatccactgcagctgctgcagccactgcctgcagaaatcaagggaaccaagctgctggctcactgggattccggggccactatcacatgcattcctgaatcatttctggaggacgaacagccaattaagaagacactgatcaagaccattcatggtgaaaagcagcagaacgtgtactatgtgactttcaaggtgaaggggagaaaggtggaggctgaagtgatcgcctccccctacgagtatattctgctgtcaccaacagatgtgccctggctgacccagcagcctctgcagctgacaatcctggtgccactgcaggagtaccaggaaaagattctgtctaagactgctctgccagaagatcagaagcagcagctgaagacactgtttgtgaagtatgacaatctgtggcagcactgggagaaccaagtgggacacagaaagattaggccacataatatcgctacaggcgactaccctccaaggccccagaagcagtatcctattaacccaaaggccaagccttccattcagatcgtgattgatgacctgctgaagcagggtgtgctgacccctcagaactctaccatgaacaccccagtgtaccctgtgccaaagcccgatgggagatggaggatggtgctggactatagagaagtgaataagactatcccactgacagctgcccagaaccagcactctgcaggaatcctggctactattgtgaggcagaagtacaagaccactctggatctggccaatggcttttgggcacatcccattacacctgaatcctactggctgactgcattcacatggcagggaaagcagtattgttggaccagactgccacagggattcctgaactctcccgccctgttcactgcagatgtggtggacctgctgaaggagatccctaacgtgcaggtgtatgtggatgacatctacctgagccacgatgacccaaaggagcatgtgcagcagctggaaaaggtgtttcagatcctgctgcaggctggatatgtggtgtctctgaagaagagcgagatcggtcagaagaccgtggagttcctggggtttaatattactaaggaaggaagaggcctgaccgatactttcaagactaagctgctgaacattacaccccctaaggacctgaagcagctgcagtctatcctgggtctgctgaacttcgccaggaacttcattccaaacttcgcagagctggtgcagcccctgtacaatctgatcgcctctgcaaaggggaagtatattgagtggagcgaggaaaataccaagcagctgaacatggttattgaagctctgaatactgccagcaacctggaggaaagactgccagagcagagactggttattaaggtgaacacttccccctcagcaggatacgtgagatactataatgagacaggcaagaagcctatcatgtacctgaactacgtgttctctaaggctgagctgaagttcagcatgctggaaaagctgctgacaaccatgcacaaggcactgattaaggctatggatctggctatgggacaggaaattctggtgtactccccaatcgtgtcaatgaccaagattcagaagactcctctgccagagagaaaggctctgcctatcaggtggattacctggatgacttacctggaagatccaaggattcagtttcactatgacaagacactgcccgagctgaagcat

SEQ ID NO: 220 - DNA, 1317 bp, Synthetic construct
  source 1..1317: mol_type = other DNA
ctgaccgctgccatcgacattctggctccccagcagtgcgccgagcctatcacctggaagtcagatgaaccagtgtgggtggaccagtggccactgactaacgataagctggcagctgcccagcagctggtgcaggagcagctggaagccggacacattactgagtctagctccccttggaacacaccaatctttgtgattaagaagaagtctggcaagtggagactgctgcaggacctgagggccgtgaatgcaacaatggtgctgatgggtgctctgcagccaggactgccatcccctgtggcaatcccccagggttacctgaagattatcattgatctgaaggactgtttctttagcattcctctgcatccatccgatcagaagagattcgctttctctctgccctccaccaacttcaaggaacctatgcagaggtttcagtggaaggtgctgccacaggggatggctaattcccccaccctgtgccagaagtatgtggctactgccatccacaaggtgagacatgcctggaagcagatgtacatcattcactatatggatgacatcctgattgcaggaaaggacggccagcaggtgctgcagtgtttcgatcagctgaagcaggagctgactgcagctggactgcatattgcccccgaaaaggtgcagctgcaggacccttacacttatctgggattcgagctgaacggcccaaagatcacaaatcagaaggcagtgattagaaaggataagctgcagaccctgaacgactttcagaagctgctgggagatattaactggctgaggccctacctgaagctgaccactggcgatctgaagcctctgttcgacactctgaagggcgattcagacccaaactctcacagaagcctgtccaaggaggcactggcttcactggagaaggtggaaacagccatcgcagaacagtttgtgacccatattaactattctctgccactgatcttcctgattttcaacaccgctctgactcctacaggtctgttctggcaggacaatccaatcatgtggattcacctgcccgccagccctaagaaggtgctgctgccctactatgatgctatcgccgacctgatcattctgggtagggatcatagcaagaagtactttgggatcgagccatccacaatcattcagccctattcaaagtctcagattgactggctgatgcagaataccgaaatgtggcctatcgcatgcgcttcattcgtgggcattctggataaccactaccctccaaataagctgattcagttttgtaagctgcataccttc

SEQ ID NO: 221 - DNA, 1323 bp, Synthetic construct
  source 1..1323: mol_type = other DNA
atgattggcgccatcgagtccaacctgtttgcagatcagatttcttggaagtcagaccagcccgtgtggctgaatcagtggcctctgaagcaggagaagctgcaggctctgcagcagctggtgaccgaacagctgcagctgggccacctggaggaatctaacagcccctggaatactccagtgttcgtgattaagaagaagtctggaaagtggagactgctgcaggatctgagggcagtgaatgctaccatgcatgacatgggggctctgcagcctggactgccatctcctgtggccgtgcccaagggatgggagattatcattatcgatctgcaggactgcttctttaacatcaagctgcaccctgaagattgtaagagattcgccttttctgtgcccagccctaatttcaagagaccatatcagaggtttcagtggaaggtgctgccacagggtatgaagaactcccccacactgtgccagaagtttgtggataaggcaattctgaccgtgagagacaagtaccaggactcatatattgtgcactacatggatgacatcctgctggcccatccttccaggtcaattgtggacgagatcctgacttccatgatccaggcactgaacaagcacgggctggtggtgtcaactgaaaagatccagaagtacgataatctgaagtacctgggcacacatatccagggtgacgccgtgtcataccagaagctgcagattagaactgataagctgaggacactgaacgacttccagaagctgctgggaaacattaattggatcagacccttcctgaagctgaccactggggagctgaagcctctgtttgaaatcctgaacggagattccaatcccatttcaatcaggaagctgacacctgaggcctgcaaggcactgcagctggtgaacgagagactgtctatcgctcgtgtgaagagactggatctgtctcggccttggagcctgtgcattctgaagaccgagtatactcccacagcctgtctgtggcagaacggagtgctggagtggattcacctgccacatatcagccccaaagtgattacaccttacgatattttctgcacccagctgattatcaagggaagacataggtccaaggagctgttttcaaaggaccctgactatatcgtggtgccatacaccaaggtgcagttcgatctgctgctgcaggagaaggaagactggccaatttccctgctgggattcctgggcgaggtgcactttcatctgcctaaggaccctctgctgaccttcactctgcagactgcaattatctttcctcacatg

SEQ ID NO: 222 - DNA, 2031 bp, Synthetic construct
  source 1..2031: mol_type = other DNA
accctgaacatcgaggacgagtatcggcttcatgagaccagcaaagagccggacgtctccctgggaagcacctggctgagcgacttcccgcaagcctgggcggagaccggtggtatggggctcgcagtgcggcaagcgccgttgataatcccgctaaaggccacgagcacgcccgtgtctatcaagcagtacccgatgagtcaagaggcacgcctcggtatcaagccgcatatccagcgcctcctggaccagggcatcctcgtgccctgccagtctccctggaatacgcctctgctacccgtcaagaagcctggcaccaacgattacaggccggtgcaagacctgcgtgaggtcaacaagcgcgtggaggacatccacccaacggtgcccaacccgtacaatctcctatctggccttccgccctcgcaccagtggtacacggtcttggacctaaaggacgcattcttctgtctgaggctgcaccctacgtcccagccgctgttcgccttcgagtggcgcgacccggagatgggcatctctggccagctaacttggacgcgattgccccaggggtttaagaactcgcccacactcttcaacgaggcactccaccgtgacctggccgactttcgcatacagcaccccgaccttatcctgttgcagtacgtcgatgacctgctcctggcggccacgtccgagctggactgccagcaaggcacccgcgccctacttcaaaccctgggcaacctgggttaccgtgcgtccgccaagaaggcccaaatctgccaaaagcaagtcaagtacctcggctacctcttgaaggagggacagcgctggctgacggaggcgaggaaggagacggtgatgggtcagcccacacccaagaccccgaggcagctaagggagttcctggggaaggcgggcttctgccgtctattcatccctggcttcgcggagatggcggccccgctgtacccgctaacgaagccgggcacgctgttcaactggggccctgaccagcagaaggcgtaccaggagatcaagcaagcgttgcttactgccccagcactcggcctccccgacctcacaaagccgttcgagctattcgttgacgagaaacagggctacgcgaagggtgtgctgactcaaaagctagggccgtggcgacgcccagtagcctacctgagcaagaagctcgaccccgtggcggcgggctggccaccatgcctccggatggtcgcggctatcgcggtgctcacaaaggatgcggggaagctcacgatggggcagcccctggtgatcctggccccacacgcggtggaggcgttagtgaagcaacctcccgaccgatggctgagcaacgcccgcatgacccactaccaggcgctcctcctcgacaccgaccgcgtgcaattcggccctgtcgtggcactgaacccggccacgctgctcccactgcccgaggaggggctacagcacaactgcctcgatatactggcggaagcccacggcacccgccccgacttgacggaccagccgcttcccgacgcggaccatacgtggtacaccgacgggagttccttactccaagagggccagcgaaaggcgggcgctgcggtgaccactgagacggaagtaatctgggcaaaggcgctgcctgcgggcacgtctgcccagcgggcggagctgatcgccctgacccaggccctcaagatggccgagggcaagaagctgaacgtttacaccgacagtcggtatgccttcgcaactgcccacatccacggcgaaatctaccgtcggcgcggctggctgacgagcgagggcaaggagatcaagaacaaggacgagatcctcgccctgctaaaggcactcttcctgcccaagcgactgtccatcattcactgtccggggcaccagaagggccattccgccgaggcgcggggcaaccgcatggcggatcaggccgctcggaaggcggcgatcaccgagacgcccgatacgagcacgctcctgattgaaaactcgtcgccg

SEQ ID NO: 223 - DNA, 2031 bp, Synthetic construct
  source 1..2031: mol_type = other DNA
accctgaacattgaggacgagtatcgcctgcacgagaccagcaaggagcccgacgtgagcctcggctcaacgtggctcagtgacttcccacaagcctgggccgagactggtggaatggggctggccgtgcgccaagctcccctcatcattcctctcaaggccacttcgacgcctgtctccatcaagcagtaccccatgtcccaggaggctaggctgggcatcaagccgcacatccaacgcctgttagatcaaggaatactggtcccctgccagtcgccgtggaatactccgctactgcctgtcaagaagccgggcacgaacgactaccggcctgtccaagacctgcgcgaggtgaacaagcgggtcgaggacattcaccccaccgttcccaacccttacaacctattgtctggcctcccaccgagccatcagtggtacaccgtcctggacctcaaggatgcgttcttctgtctgcggctacaccctacgtcgcaaccactcttcgccttcgagtggcgggatccggagatggggatctcggggcagctcacgtggactcggctgcctcaggggttcaagaactccccaacactctttaacgaggcactgcatcgggatctggccgacttccgtatccagcacccagacctcatcctcctacagtacgtggacgacttgctgctggccgcgaccagcgagctggactgccagcaagggacacgcgcgctgctccagacgctcgggaacctgggataccgcgccagcgctaagaaggctcaaatctgtcagaaacaagtgaagtacctgggttacctgctcaaggagggtcagcgttggcttaccgaggcccgcaaggagaccgtgatggggcaacccacgccaaagacgccccgacagctacgcgagttcctgggcaaggctgggttctgtcggttgttcatccccggtttcgctgagatggccgcccctctctacccgctgacgaaacctgggactctgttcaactggggccctgaccagcagaaggcgtaccaggagatcaagcaagcgctgcttaccgccccggcgctcggattgccggaccttaccaagcccttcgagctgttcgtggacgagaagcaaggttacgcgaagggcgtcctgacacaaaagttggggccctggcgtaggccggtcgcctacctcagcaagaagttggaccccgtggcggcgggctggccgccgtgcctccgtatggtggcagccatcgccgttctcaccaaagacgctggcaagctcacgatggggcagcctctggtgatcctggcaccccatgccgtcgaggcgctcgtgaagcagccgcctgaccgctggctgagtaacgcacggatgacccattaccaagccctattgctagacacggatcgcgtccaatttgggcccgtggtggctctgaaccctgccactctccttcccctccctgaggagggcttgcagcataactgcctggacatactggctgaggcccacgggacaaggccggacctaacggaccagcctctaccggacgcggatcacacatggtacaccgacggctcctctctcctacaagaggggcagcggaaggcgggtgccgccgtcaccacggagacggaggtgatctgggctaaggcactgcccgccgggacttcggcacagcgagccgagctaatagccctcacacaagcgctgaaaatggccgagggcaagaagctaaacgtctatacggactcccgatacgctttcgccaccgcccacattcatggcgaaatctaccgccgccgtggctggctgacgtccgagggcaaggagatcaagaacaaggacgagatcctcgccctcctgaaagccctgttcctgccgaaaaggctttcgataatccactgccccggccaccagaaggggcactccgccgaggcacgcggcaaccgtatggccgaccaggccgcccggaaggcggcgatcacggaaaccccggacacatccacgctcctcatcgagaacagcagcccc

SEQ ID NO: 224 - DNA, 2031 bp, Synthetic construct
  source 1..2031: mol_type = other DNA
accctcaacatcgaggacgagtaccgtctgcacgagacgtcgaaggagccggatgtctcactcggctccacgtggctcagcgacttcccacaggcgtgggcggagaccggtggcatgggactggcggtgcgacaagcgccccttatcattcccctaaaggcgacgtcaactcctgtttccattaagcagtaccctatgtcccaggaggcccggctcggcatcaagccacacatccaacggctattggaccagggtatcttggtgccgtgccaatccccgtggaacactccccttctacccgtcaagaagccaggcaccaacgactaccgccccgtgcaagacctgcgcgaggtcaacaagcgagtggaggacatccatcctaccgtcccgaacccgtacaacctgctttccggcctcccgccctcgcaccagtggtacaccgttctcgacttgaaggacgcattcttctgtctgcgcctccacccaacgagccagcccctcttcgctttcgagtggcgcgacccggagatgggaatttcgggccagcttacatggacccgcctcccacaggggttcaagaacagcccgacgctgttcaacgaggccctgcaccgcgacttggcagacttccgaatccagcatcccgacctaatcctcctgcaatacgttgacgacttattgctggccgcgaccagcgagcttgactgccagcaagggactcgcgcgcttctacagacgctcgggaacctgggctaccgtgcctcagctaagaaggcccagatttgccagaagcaagttaagtatctcggctacctcctcaaggagggacagcggtggctgacggaggcccgcaaggagacggtcatgggccagccaacaccgaaaacgcccagacaactccgcgagttcctcggcaaagcgggcttctgtcggctgtttatccccggcttcgccgagatggccgcgcccctctacccactgacgaaacccggcaccctgttcaactggggcccggatcagcagaaggcgtatcaggagatcaagcaagcactcctgacagccccggccctgggattgcccgaccttacgaagcccttcgagttattcgtggacgagaagcaaggctatgcgaagggtgtcctcacgcagaagctggggccctggaggcggcccgtcgcgtacctaagcaagaagctcgacccagtggcggcgggttggccgccctgcctccgcatggtggccgcgattgcggttctcacaaaggacgccgggaagctcacgatggggcagccacttgtcatcctcgctccgcacgccgtggaggcactggtgaagcagccgccggatcgctggctgtctaatgctcgcatgacccactatcaggcgctgctcctagacactgacagggttcagttcggccccgttgtcgcgcttaaccccgctacactactcccgctgccggaggagggtttgcagcataactgcctcgacatcctcgccgaggcccacggcacgcgacccgacctaacggaccagccgctgccggacgctgaccacacttggtacaccgacggcagctccctcctgcaagagggacagcggaaggccggtgccgccgtgacgacggagacggaggtgatatgggctaaggccctgcccgctggtacgtccgcccagcgagccgagctgatcgccctgacgcaagccctcaagatggccgagggcaagaagctaaacgtctatacggacagccgctacgcattcgccacagcccacattcacggagagatataccggaggcgcggctggcttacgtccgaaggcaaggagattaagaacaaagatgagattctggcgctgttgaaggccctcttcctccccaagcggctttccatcatacactgtccaggccaccagaagggccactcggcggaggcgcggggcaaccggatggccgaccaggcggcgcgcaaagccgcgatcacggagaccccagacacttccacgctcctgatcgagaacagtagcccc

SEQ ID NO: 225 - DNA, 2031 bp, Synthetic construct
  source 1..2031: mol_type = other DNA
actttgaatatcgaagatgagtaccggctacatgagacgtctaaggagcctgatgtttcactcgggagcacttggctaagcgatttcccacaagcgtgggctgaaacgggcgggatgggcctcgctgtaagacaagcgccacttatcatcccgcttaaagctacttctactcccgtctctattaagcaatacccaatgtcccaggaagctcgtttgggcattaagcctcatatacaaaggctactcgatcagggcatacttgttccctgccaatcaccgtggaatacgcccctattaccagttaagaagcctgggactaacgactatcgccccgtacaggatctacgtgaggtgaacaagcgtgtagaggacatccatccgaccgttccgaatccatacaatttgctttctggattacctccaagtcatcaatggtacaccgtgctggatctcaaggacgcattcttctgtctaagattacatcctactagccagccacttttcgcattcgagtggcgagatcccgagatgggaatttcgggccagcttacatggacgaggcttcctcaaggcttcaagaactctcctaccttgttcaatgaggctctacaccgcgacctcgcagacttccggatacaacatccggacctcatactcctacaatatgtggacgatctattgctggccgcgacgagcgaattggattgtcagcaaggaacccgcgccttgttacaaacgttggggaacttggggtatcgagcatcagccaagaaggcacaaatctgccagaaacaagtgaagtatttggggtacttactgaaagaggggcaacgatggttgaccgaagctcgcaaggaaactgttatgggccagccgacacctaagactccaagacagctccgagagttcctcggcaaggctgggttctgtcgcctattcattcctgggtttgccgaaatggctgctcctctgtacccgttgaccaaaccgggaaccttgttcaattggggaccagatcaacagaaggcgtatcaggagatcaagcaagcgctgttgactgcgcctgcgttgggcttgccggatttgacaaaaccctttgaacttttcgttgacgagaaacaaggttacgcgaagggagttcttacacaaaagctgggcccctggagacgacctgttgcttatcttagcaagaagttagatcccgttgctgcggggtggccgccctgcttgaggatggttgccgccattgcggttctgactaaagatgcgggcaaattgacgatgggccagccgctcgtaattctcgccccgcacgcagtcgaagccctagtgaagcagcctcctgaccgttggctctccaacgctcggatgacccactatcaagcgctgctgttggataccgatagagttcaattcgggccggtcgtagcgctcaatcccgcaacgctattacccctgcctgaggagggactacaacataactgcttggatattctagcggaggctcatgggacaagacctgacttgacagatcagcccttgccagatgccgaccacacatggtacactgacggctcatcacttctacaagagggccaaaggaaggccggagctgcggtgacgactgaaaccgaggtgatctgggcaaaggctttacccgctggaacttctgctcagcgcgcagagcttatcgccctaactcaagccctgaaaatggctgagggcaagaagttgaatgtctataccgattcacggtatgctttcgctaccgcccacattcatggagaaatctatcggcgacgaggttggctcacgtctgaggggaaggagattaagaacaaggacgaaatcttagctctgctgaaagctctattcttacccaaacgcttgtcgattatccactgcccaggacaccaaaagggccattccgccgaagccaggggaaaccgtatggccgatcaagctgcccggaaggctgcaataaccgaaacccctgacacttccacgctactcatcgaaaactctagccca

SEQ ID NO: 226 - DNA, 2031 bp, Synthetic construct
  source 1..2031: mol_type = other DNA
accttgaatatcgaagatgagtacagactccatgagaccagcaaggagcctgatgtgagcctgggaagtacatggctatctgactttcctcaggcttgggcggagaccggtggcatgggcctggctgtccggcaagcacccctaatcatcccgttgaaagcaacgtccacacccgtatctatcaagcagtacccgatgagccaagaggcacggctagggattaagccgcacatccaaagattgttagaccaggggatactcgttccctgtcaatctccgtggaacacaccgttactgcctgttaagaagcccggcacaaatgattatcggcctgtacaagacctgcgcgaagtgaacaaacgagtggaagatattcaccccaccgtgccgaatccttacaacttgctaagcggtttaccacccagtcaccagtggtacaccgtcttggacctcaaagacgcattcttctgcttgcggttgcatcctacgagtcagccgctctttgcctttgaatggagagatcccgagatgggcataagtggtcagcttacatggacgaggctacctcagggattcaagaactcgcctaccttattcaatgaggctctacacagggatcttgctgactttcggatacaacaccctgacttaattctgctacaatatgttgacgatctgctgcttgcggcgaccagtgaactcgactgccaacaagggacaagagccttgttacagacacttggcaatctcggctaccgcgcgtctgctaagaaggcacagatttgccaaaagcaagtgaagtatctcggttacctgctgaaagagggacaaagatggttgaccgaagccaggaaggaaactgtcatggggcaacccacccctaaaaccccaagacagcttagagagttcctcgggaaagctgggttctgccgcctgttcattcccggtttcgctgaaatggctgcacctctatacccactgaccaaaccgggcacgctattcaattggggaccggatcaacaaaaggcttaccaggagatcaagcaagctctattgacagctccggctctgggtttacccgacttgactaaacccttcgagttgttcgttgacgagaaacagggctacgcgaaaggcgtactgacgcagaaactgggcccgtggcggcgacccgttgcttacctttccaagaagctggaccctgttgccgctggctggccgccctgccttcgcatggttgcggccattgctgtccttacgaaagatgctgggaaactaactatgggtcagccgctcgtaattctcgcgccacacgctgtcgaggctctagtcaaacaacctcctgaccgctggctgtcgaatgcacggatgacacattaccaggcgttgctattggacactgaccgagtacaatttggaccagtagtggctttaaatcccgcgacactccttccccttcctgaggagggtttgcaacacaactgtcttgatatacttgctgaggcccacggaacaagacccgatctcacagatcaacccctccccgacgcagatcacacctggtacaccgacggttcaagcctgttacaggaaggccagcgaaaggccggagcagccgtgacaaccgaaaccgaagttatctgggcaaaggccctaccagccgggacaagcgcgcagagggccgagctgatcgcgctcacacaagcactcaaaatggccgaaggcaagaagctcaatgtttacactgattcccgctacgcattcgctaccgctcatattcacggagaaatctacaggaggcgagggtggcttactagcgaaggaaaggagattaagaacaaagacgagatcctggcactattgaaagccttgttcctgccaaagcgcttatctatcattcactgtccgggccaccagaagggccacagtgctgaggctcggggcaatcggatggcagatcaggccgcacgaaaagccgcaattactgagacacctgacacatctaccttgctgattgagaactcgtctccg

SEQ ID NO: 227 - DNA, 2073 bp, Soybean chlorotic mottle virus
  source 1..2073: mol_type = genomic DNA
aatactgaaattgtccaaaaacaccgagttttaaccaaaggtaaccctaatgttactttcataaaagttagtataggcaaaagaaatttcttggcttatattgatactggagcaactctgtgctttggaaaaagaaaaatttcaaataattgggaaattttaaaacaaccaaaagaaattatcattgcagataaatcaaaacactatattagagaagctatttctaatgtgtttttaaaaatcgaaaataaagaattcttaatccctatcatatatttacatgattcaggattagatttaattataggaaacaatttcctaaaattataccaaccttttattcagagattggaaacaattgaattaagatggaaaaatcttaataacccaaaagaatctcaaatgatttcaaccaagattcttacaaaaaatgaagtattaaaactttcatttgaaaaaattcatatttgtttagaaaaatatttatttttcaaaacaattgaagaacaactcgaagaagtatgttcagaacatccactggatgaaacaaaaaataaaaatggtcttttaatagaaataagacttaaagacccattacaagaaataaatgtcacaaatagaattccatatacaataagagatgtacaagaattcaaggaggaatgtgaagacctcttaaaaaagggcttaattcgagaatctcaaagtccacacagtgcaccggcattctatgtcgaaaatcacaatgaaatcaagcgtggaaaaagacgcatggtaattaattacaaaaaaatgaatgaagccacaattggcgattcatataagttaccaagaaaagattttattctggaaaaaataaaaggatctttatggttttcaagcttggatgctaaatctggatactaccagctaaggctccatgaaaatacaaagcctctaacagctttttcatgtccacctcagaaacattacgaatggaatgttttaagttttggacttaaacaagcaccatctatatatcaaagatttatggatcaatccctcaagggacttgaacatatatgtttggcatatattgatgacatcctgatctttacaaaaggatctaaagaacaacatgtaaatgatgttcggattgttttgcaaagaatcaaagaaaaaggaattattatttctaagaaaaaatcaaaactgattcaacaggaaatcgaatatctcggtttaaaaatacaagggaatggagaaattgatttatcacctcatacccaagaaaaaattcttcaatttcctgatgaattagaagatagaaaacaaatacagcgttttcttggctgtattaattacattgcaaatgaaggatttttcaaaaatcttgctctagaaagaaagcaccttcaaaagaaaatttctgttaaaaacccctggaaatgggatacaatagatacaaaaatggttcagtccataaaaggcaaaattcaaagcctaccaaaattatataatgcatcgattcaagactttttaatagtcgagacagatgcatcgcaacactcctggagtggatgtttgcgagctttacccaagggaaagcaaaaaatcggactcgatgaattcgggataccgacagctgacctctgcacaggtagcagttcagcttcaagcgataattcgccagctgagattgacaaatgtcattcagccagtaaacaggacactcatgtggccagtaaaataaagaaactcgaaaacgagcttctactttgcaaatatgtttcaggtaccttcacagatacggaaacaagataccctatagcagaactggaggttcttgctggagtaaaagtcctagaaaaatggagaatcgacctcctacaaacgaggttcctcctccgcactgacagcaagtactttgcaggtttttgtaggtacaacatcaagacagactaccggaacggacgtctaatcaggtggcaactacggttacaagcctatcaaccgtacgtggaattaatcaaatcagaaaataacccattcgcagatacgcttacgcgagaatggagcaagccatcaagcagt

SEQ ID NO: 228 - DNA, 2073 bp, Synthetic construct
  source 1..2073: mol_type = other DNA
aacactgagattgttcaaaaacatagagtgcttaccaaaggaaatccaaatgttacatttataaaagtgtccatagggaagagaaattttttagcttatattgacactggagccacactctgttttggaaaaaggaaaatatcaaataactgggaaatccttaagcaacccaaagaaatcattatcgctgataagtcaaaacactacatcagagaagctataagtaacgtattcctgaaaattgaaaacaaggagttcttgatacccattatatatcttcatgattcagggttggatttgattattgggaataacttcctgaagctttatcaaccatttattcaaagacttgaaactatcgaactcaggtggaaaaacttgaacaatcccaaagagtctcaaatgattagcactaaaattcttacgaaaaatgaagttcttaagctgagttttgagaagattcatatttgtctcgaaaaataccttttctttaaaaccatcgaggaacaacttgaggaggtttgttctgaacatccacttgatgagacaaagaacaagaatggtcttttgattgagatacgtctgaaagatcctctgcaggagattaacgtcacaaataggattccatataccattagagatgtacaggaattcaaggaagaatgtgaagatttacttaagaagggtctcattcgtgaatcacaatctccccacagtgcacccgcattttacgttgaaaatcataatgaaattaagagaggcaagcgtagaatggttatcaactacaagaagatgaatgaagcaaccataggagatagctacaaactcccgcgaaaggattttatcttagagaagataaagggcagtttgtggttttcaagtttagatgcaaaatcaggttattatcagcttcgcttacatgagaacacaaagcctctcactgctttctcttgccctcctcaaaaacattatgaatggaatgtgttgagtttcggtctaaaacaggcaccttcgatttaccagcgcttcatggaccagtccttaaagggattagagcacatttgcttggcatatatagatgatatcttaatctttactaaaggctcaaaggaacagcatgtcaatgatgttcggattgtcctgcaaagaataaaagagaaaggaatcataatatctaaaaaaaaatcaaaattgattcagcaagagattgaatatctaggattgaaaattcaaggtaatggtgaaattgacctctcaccacatactcaagaaaagatcctacagttccctgatgaactggaggatagaaaacaaatacagaggtttctaggttgcattaattacattgcgaacgaaggatttttcaaaaatcttgccctagagagaaagcacttgcagaagaagatttccgtgaagaatccatggaagtgggatacaatagacacaaaaatggtgcaatcaatcaagggcaaaattcaatccctgccgaagctctacaatgcaagtattcaggatttcctaattgtagagactgacgcctcgcaacattcttggtctgggtgtttgcgggctcttccaaagggcaagcagaaaatcggtctggacgaatttgggattccaacggcagatttatgtactggtagctccagtgcttcctctgataattctcctgctgagatcgacaagtgccactcagcctcgaagcaggatacacacgtcgcctctaaaataaagaaacttgagaatgagttacttttgtgcaagtatgtttcagggactttcacggacaccgagactaggtatcctatagctgaactcgaggtgttggcgggtgttaaagttttggaaaaatggaggatagacttgttgcaaacacgatttctacttaggacagattccaaatattttgctggattttgtagatacaacattaagactgattatcggaacgggaggctcataagatggcaattgcgccttcaagcttaccagccttatgtggaactgatcaagagtgaaaataatccttttgcagacaccctaacacgagagtggagcaaaccatcttctagc

SEQ ID NO: 229 - DNA, 2034 bp, Cauliflower mosaic virus
  source 1..2034: mol_type = genomic DNA
gatcatctacttctgaagactcagactcagactgagcaggtgatgaacgtcaccaatcccaattcgatctacatcaagggaagactctacttcaagggatacaagaagatagaacttcactgtttcgtagacacgggagcaagcctatgcatagcatccaagttcgtcataccagaagaacattgggtcaatgcagaaagaccaattatggtcaaaatagcagatggaagctcaatcaccatcagcaaagtctgcaaagacatagacttgatcatagccggcgagatattcagaattcccaccgtctatcagcaagaaagtggcatcgatttcattatcggcaacaacttctgtcagctgtatgaaccattcatacagtttacggatagagttatcttcacaaagaacaagtcttatcctgttcatattgcgaagctaaccagagcagtgcgagtaggcaccgaaggatttcttgaatcaatgaagaaacgttcaaaaactcaacaaccagagccagtgaacatttctacaaacaagatagaaaatccactagaagaaattgctattctttcagaggggaggaggttatcagaagaaaaactctttatcactcaacaaagaatgcaaaaaatcgaagaactacttgagaaagtatgttcagaaaatccattagatcctaacaagactaagcaatggatgaaagcttctatcaagctcagcgacccaagcaaagctatcaaggttaaacccatgaagtatagcccaatggatcgcgaagaatttgacaagcaaatcaaagaattactggacctaaaagtcatcaagcccagtaaaagccctcacatggcaccagccttcttggtcaacaatgaagccgagaagcgaagaggaaagaaacgtatggtagtcaactacaaagctatgaacaaagctactgtaggagatgcctacaatcttcccaacaaagacgagttacttacactcattcgaggaaagaagatcttctcttccttcgactgtaagtcaggattctggcaagttctgctagatcaagaatcaagacctctaacggcattcacatgtccacaaggtcactacgaatggaatgtggtccctttcggcttaaagcaagctccatccatattccaaagacacatggacgaagcatttcgtgtgttcagaaagttctgttgcgtttatgtcgacgacattctcgtattcagtaacaacgaagaagatcatctacttcacgtagcaatgatcttacaaaagtgtaatcaacatggaattatcctttccaagaagaaagcacaactcttcaagaagaagataaacttccttggtctagaaatagatgaaggaacacataagcctcaaggacatatcttggaacacatcaacaagttccccgatacccttgaagacaagaagcaacttcagagattcttaggcatactaacatatgcctcggattacatcccgaagctagctcaaatcagaaagcctctgcaagccaagcttaaagaaaacgttccatggagatggacaaaagaggataccctctacatgcaaaaggtgaagaaaaatctgcaaggatttcctccactacatcatcccttaccagaggagaagctgatcatcgagaccgatgcatcagacgactactggggaggtatgttaaaagctatcaaaattaacgaaggtactaatactgagttaatttgcagatacgcatctggaagctttaaagctgcagaaaagaattaccacagcaatgacaaagagacattggcggtaataaatactataaagaaatttagtatttatctaactcctgttcattttctgattaggacagataatactcatttcaagagtttcgttaatctcaattacaaaggagattcgaaacttggaagaaacatcagatggcaagcatggcttagccactattcatttgatgttgaacacattaaaggaaccgacaaccactttgcggacttcctttcaagagaattcaataaggttaattcc

SEQ ID NO: 230 - DNA, 2034 bp, Synthetic construct
  source 1..2034: mol_type = other DNA
gatcaccttctgcttaagacacagacacaaactgaacaagttatgaatgtgaccaacccgaattccatttacattaagggacgactctactttaaggggtataagaaaatagaattacattgtttcgtcgacactggagcatctctctgcatagcgtccaagtttgttattcctgaggaacattgggtaaatgcagaaaggccgattatggttaaaattgcagatggtagcagcatcacaatctcaaaagtttgcaaggacattgacttgatcattgctggtgagattttcagaattcctacagtgtatcaacaagaatccggcattgattttataattggtaataacttttgtcaactttatgagcccttcatacaatttacagatcgagtcatttttactaaaaacaagagttaccctgttcacattgcaaaactcactcgtgccgtgagagttggaacggaaggatttctagaatctatgaagaagagatcgaaaactcagcaaccagaacccgttaatatttctacaaataagattgaaaatccattagaggaaatagccatcttgtccgaaggccggcggttgagtgaagaaaagttgtttatcacgcagcagagaatgcaaaaaatagaggagcttctcgaaaaggtttgttctgagaatcctttggatccaaataaaacaaaacaatggatgaaagctagtataaagctttcagacccatcaaaggcaattaaggtgaagccaatgaaatatagccccatggatagggaggagtttgacaagcaaattaaggagctactcgatctgaaagtaataaaaccttctaaatcgcctcacatggctccagcattcctggttaacaacgaggctgaaaagcgcagaggaaaaaaaagaatggtggtgaactacaaagcaatgaataaggctactgttggagatgcttataatcttcctaataaagatgagctcttgaccttaattagagggaagaaaattttctcctcatttgattgtaaatcaggattttggcaagtgttgctggatcaagagtctcgtccactgaccgcctttacgtgccctcaaggacattatgaatggaatgtcgtaccatttggtctcaagcaagcaccttctattttccagaggcatatggatgaagcatttagagtgtttaggaaattctgctgtgtttatgtggatgatatattggtattctcaaataatgaggaagaccatttgctgcatgttgccatgattcttcagaagtgcaatcaacatggaatcatcttatccaagaagaaggctcagttgttcaagaagaagataaattttttgggtctcgagattgatgaggggacacataagcctcagggtcatatactagaacatatcaacaagtttccagacactttggaagacaaaaagcagttgcaaaggttccttgggattctgacttatgcttcagattatataccaaagcttgctcaaataagaaaaccccttcaggcgaagctcaaagaaaacgttccttggaggtggactaaggaggataccttatacatgcagaaagtcaagaaaaacctccagggtttcccaccgctccaccatcctttacctgaagaaaaactaattatcgagacagatgcttctgatgactactggggcggcatgttgaaggccatcaaaatcaatgaagggaccaatactgagctcatttgtcgatatgcaagcggaagttttaaagcagctgagaaaaattatcatagtaatgataaagagactctagccgttattaacaccataaagaaattctctatatatcttacccccgtccactttttaatcaggacagacaacactcacttcaaatcatttgtgaacctgaattacaagggtgatagtaaacttggccgtaacatacgctggcaggcttggttgagccactactcttttgatgtagaacacattaaaggaacagataatcattttgctgatttcctttctcgcgagttcaacaaagtaaattca

SEQ ID NO: 231 - protein, 683 aa, Moloney Murine Leukemia Virus
TLNIEDEHRLHETSKEPDVSLGSTWLSDFPQAWAETGGMGLAVRQAPLIIPLKATSTPVSIKQYPMSQEARLGIKPHIQRLLDQGILVPCQSPWNTPLLPVKKPGTNDYRPVQDLREVNKRVEDIHPTVPNPYNLLSGLPPSHQWYTVLDLKDAFFCLRLHPTSQPLFAFEWRDPEMGISGQLTWTRLPQGFKNSPTLFDEALHRDLADFRIQHPDLILLQYVDDLLLAATSELDCQQGTRALLQTLGNLGYRASAKKAQICQKQVKYLGYLLKEGQRWLTEARKETVMGQPTPKTPRQLREFLGTAGFCRLWIPGFAEMAAPLYPLTKTGTLFNWGPDQQKAYQEIKQALLTAPALGLPDLTKPFELFVDEKQGYAKGVLTQKLGPWRRPVAYLSKKLDPVAAGWPPCLRMVAAIAVLTKDAGKLTMGQPLVILAPHAVEALVKQPPDRWLSNARMTHYQALLLDTDRVQFGPVVALNPATLLPLPEEGLQHNCLDILAEAHGTRPDLTDQPLPDADHTWYTDGSSLLQEGQRKAGAAVTTETEVIWAKALPAGTSAQRAELIALTQALKMAEGKKLNVYTDSRYAFATAHIHGEIYRRRGLLTSEGKEIKNKDEILALLKALFLPKRLSIIHCPGHQKGHSAEARGNRMADQAARKAAITETPDTSTLLIENSSPNSRLIN

SEQ ID NO: 232 - protein, 717 aa, Moloney Murine Leukemia Virus
MKRTADGSEFESPKKKRKVTLNIEDEHRLHETSKEPDVSLGSTWLSDFPQAWAETGGMGLAVRQAPLIIPLKATSTPVSIKQYPMSQEARLGIKPHIQRLLDQGILVPCQSPWNTPLLPVKKPGTNDYRPVQDLREVNKRVEDIHPTVPNPYNLLSGLPPSHQWYTVLDLKDAFFCLRLHPTSQPLFAFEWRDPEMGISGQLTWTRLPQGFKNSPTLFNEALHRDLADFRIQHPDLILLQYVDDLLLAATSELDCQQGTRALLQTLGNLGYRASAKKAQICQKQVKYLGYLLKEGQRWLTEARKETVMGQPTPKTPRQLREFLGKAGFCRLFIPGFAEMAAPLYPLTKPGTLFNWGPDQQKAYQEIKQALLTAPALGLPDLTKPFELFVDEKQGYAKGVLTQKLGPWRRPVAYLSKKLDPVAAGWPPCLRMVAAIAVLTKDAGKLTMGQPLVILAPHAVEALVKQPPDRWLSNARMTHYQALLLDTDRVQFGPVVALNPATLLPLPEEGLQHNCLDILAEAHGTRPDLTDQPLPDADHTWYTDGSSLLQEGQRKAGAAVTTETEVIWAKALPAGTSAQRAELIALTQALKMAEGKKLNVYTDSRYAFATAHIHGEIYRRRGWLTSEGKEIKNKDEILALLKALFLPKRLSIIHCPGHQKGHSAEARGNRMADQAARKAAITETPDTSTLLIENSSPSGGSKRTADGSEFEPKKKRKV

SEQ ID NO: 233 - protein, 677 aa, Synthetic construct
TLNIEDEHRLHETSKEPDVSLGSTWLSDFPQAWAETGGMGLAVRQAPLIIPLKATSTPVSIKQYPMSQEARLGIKPHIQRLLDQGILVPCQSPWNTPLLPVKKPGTNDYRPVQDLREVNKRVEDIHPTVPNPYNLLSGLPPSHQWYTVLDLKDAFFCLRLHPTSQPLFAFEWRDPEMGISGQLTWTRLPQGFKNSPTLFNEALHRDLADFRIQHPDLILLQYVDDLLLAATSELDCQQGTRALLQTLGNLGYRASAKKAQICQKQVKYLGYLLKEGQRWLTEARKETVMGQPTPKTPRQLREFLGKAGFCRLFIPGFAEMAAPLYPLTKPGTLFNWGPDQQKAYQEIKQALLTAPALGLPDLTKPFELFVDEKQGYAKGVLTQKLGPWRRPVAYLSKKLDPVAAGWPPCLRMVAAIAVLTKDAGKLTMGQPLVILAPHAVEALVKQPPDRWLSNARMTHYQALLLDTDRVQFGPVVALNPATLLPLPEEGLQHNCLDILAEAHGTRPDLTDQPLPDADHTWYTDGSSLLQEGQRKAGAAVTTETEVIWAKALPAGTSAQRAELIALTQALKMAEGKKLNVYTDSRYAFATAHIHGEIYRRRGWLTSEGKEIKNKDEILALLKALFLPKRLSIIHCPGHQKGHSAEARGNRMADQAARKAAITETPDTSTLLIENSSP

SEQ ID NO: 234 - protein, 2050 aa, Synthetic construct
MKRTADGSEFESPKKKRKVTLNIEDEHRLHETSKEPDVSLGSTWLSDFPQAWAETGGMGLAVRQAPLIIPLKATSTPVSIKQYPMSQEARLGIKPHIQRLLDQGILVPCQSPWNTPLLPVKKPGTNDYRPVQDLREVNKRVEDIHPTVPNPYNLLSGLPPSHQWYTVLDLKDAFFCLRLHPTSQPLFAFEWRDPEMGISGQLTWTRLPQGFKNSPTLFNEALHRDLADFRIQHPDLILLQYVDDLLLAATSELDCQQGTRALLQTLGNLGYRASAKKAQICQKQVKYLGYLLKEGQRWLTEARKETVMGQPTPKTPRQLREFLGKAGFCRLFIPGFAEMAAPLYPLTKPGTLFNWGPDQQKAYQEIKQALLTAPALGLPDLTKPFELFVDEKQGYAKGVLTQKLGPWRRPVAYLSKKLDPVAAGWPPCLRMVAAIAVLTKDAGKLTMGQPLVILAPHAVEALVKQPPDRWLSNARMTHYQALLLDTDRVQFGPVVALNPATLLPLPEEGLQHNCLDILAEAHGTRPDLTDQPLPDADHTWYTDGSSLLQEGQRKAGAAVTTETEVIWAKALPAGTSAQRAELIALTQALKMAEGKKLNVYTDSRYAFATAHIHGEIYRRRGWLTSEGKEIKNKDEILALLKALFLPKRLSIIHCPGHQKGHSAEARGNRMADQAARKAAITETPDTSTLLIENSSPNSRLINSGGSSGGSSGSETPGTSESATPESSGGSSGGSSKLEKFTNCYSLSKTLRFKAIPVGKTQENIDNKRLLVEDEKRAEDYKGVKKLLDRYYLSFINDVLHSIKLKNLNNYISLFRKKTRTEKENKELENLEINLRKEIAKAFKGNEGYKSLFKKDIIETILPEFLDDKDEIALVNSFNGFTTAFTGFFDNRENMFSEEAKSTSIAFRCINENLTRYISNMDIFEKVDAIFDKHEVQEIKEKILNSDYDVEDFFEGEFFNFVLTQEGIDVYNAIIGGFVTESGEKIKGLNEYINLYNQKTKQKLPKFKPLYKQVLSDRESLSFYGEGYTSDEEVLEVFRNTLNKNSEIFSSIKKLEKLFKNFDEYSSAGIFVKNGPAISTISKDIFGEWNVIRDKWNAEYDDIHLKKKAVVTEKYEDDRRKSFKKIGSFSLEQLQEYADADLSVVEKLKEIIIQKVDEIYKVYGSSEKLFDADFVLEKSLKKNDAVVAIMKDLLDSVKSFENYIKAFFGEGKETNRDESFYGDFVLAYDILLKVDHIYDAIRNYVTQKPYSKDKFKLYFQNPQFMGGWDKDKETDYRATILRYGSKYYLAIMDKKYAKCLQKIDKDDVNGNYEKINYKLLPGPNKMLPKVFFSKKWMAYYNPSEDIQKIYKNGTFKKGDMFNLNDCHKLIDFFKDSISRYPKWSNAYDFNFSETEKYKDIAGFYREVEEQGYKVSFESASKKEVDKLVEEGKLYMFQIYNKDFSDKSHGTPNLHTMYFKLLFDENNHGQIRLSGGAELFMRRASLKKEELVVHPANSPIANKNPDNPKKTTTLSYDVYKDKRFSEDQYELHIPIAINKCPKNIFKINTEVRVLLKHDDNPYVIGIDRGERNLLYIVVVDGKGNIVEQYSLNEIINNFNGIRIKTDYHSLLDKKEKERFEARQNWTSIENIKELKAGYISQVVHKICELVEKYDAVIALEDLNSGFKNSRVKVEKQVYQKFEKMLIDKLNYMVDKKSNPCATGGALKGYQITNKFESFKSMSTQNGFIFYIPAWLTSKIDPSTGFVNLLKTKYTSIADSKKFISSFDRIMYVPEEDLFEFALDYKNFSRTDADYIKKWKLYSYGNRIRIFRNPKKNNVFDWEEVCLTSAYKELFNKYGINYQQGDIRALLCEQSDKAFYSSFMALMSLMLQMRNSITGRTDVDFLISPVKNSDGIFYDSRNYEAQENAILPKNADANGAYNIARKVLWAIGQFKKAEDEKLDKVKIAISNKEWLEYAQTSVKHSGGSSGGSSGSETPGTSESATPESSGGSSGGSALDFLSRLPLPPPVSPICTFVSPAAQKAFQPPRSCGSGGSKRTADGSEFEPKKKRKV

SEQ ID NO: 235 - protein, 2824 aa, Synthetic construct
MKRTADGSEFESPKKKRKVTLNIEDEHRLHETSKEPDVSLGSTWLSDFPQAWAETGGMGLAVRQAPLIIPLKATSTPVSIKQYPMSQEARLGIKPHIQRLLDQGILVPCQSPWNTPLLPVKKPGTNDYRPVQDLREVNKRVEDIHPTVPNPYNLLSGLPPSHQWYTVLDLKDAFFCLRLHPTSQPLFAFEWRDPEMGISGQLTWTRLPQGFKNSPTLFNEALHRDLADFRIQHPDLILLQYVDDLLLAATSELDCQQGTRALLQTLGNLGYRASAKKAQICQKQVKYLGYLLKEGQRWLTEARKETVMGQPTPKTPRQLREFLGKAGFCRLFIPGFAEMAAPLYPLTKPGTLFNWGPDQQKAYQEIKQALLTAPALGLPDLTKPFELFVDEKQGYAKGVLTQKLGPWRRPVAYLSKKLDPVAAGWPPCLRMVAAIAVLTKDAGKLTMGQPLVILAPHAVEALVKQPPDRWLSNARMTHYQALLLDTDRVQFGPVVALNPATLLPLPEEGLQHNCLDILAEAHGTRPDLTDQPLPDADHTWYTDGSSLLQEGQRKAGAAVTTETEVIWAKALPAGTSAQRAELIALTQALKMAEGKKLNVYTDSRYAFATAHIHGEIYRRRGWLTSEGKEIKNKDEILALLKALFLPKRLSIIHCPGHQKGHSAEARGNRMADQAARKAAITETPDTSTLLIENSSPNSRLINSGGSSGGSSGSETPGTSESATPESSGGSSGGSSKLEKFTNCYSLSKTLRFKAIPVGKTQENIDNKRLLVEDEKRAEDYKGVKKLLDRYYLSFINDVLHSIKLKNLNNYISLFRKKTRTEKENKELENLEINLRKEIAKAFKGNEGYKSLFKKDIIETILPEFLDDKDEIALVNSFNGFTTAFTGFFDNRENMFSEEAKSTSIAFRCINENLTRYISNMDIFEKVDAIFDKHEVQEIKEKILNSDYDVEDFFEGEFFNFVLTQEGIDVYNAIIGGFVTESGEKIKGLNEYINLYNQKTKQKLPKFKPLYKQVLSDRESLSFYGEGYTSDEEVLEVFRNTLNKNSEIFSSIKKLEKLFKNFDEYSSAGIFVKNGPAISTISKDIFGEWNVIRDKWNAEYDDIHLKKKAVVTEKYEDDRRKSFKKIGSFSLEQLQEYADADLSVVEKLKEIIIQKVDEIYKVYGSSEKLFDADFVLEKSLKKNDAVVAIMKDLLDSVKSFENYIKAFFGEGKETNRDESFYGDFVLAYDILLKVDHIYDAIRNYVTQKPYSKDKFKLYFQNPQFMGGWDKDKETDYRATILRYGSKYYLAIMDKKYAKCLQKIDKDDVNGNYEKINYKLLPGPNKMLPKVFFSKKWMAYYNPSEDIQKIYKNGTFKKGDMFNLNDCHKLIDFFKDSISRYPKWSNAYDFNFSETEKYKDIAGFYREVEEQGYKVSFESASKKEVDKLVEEGKLYMFQIYNKDFSDKSHGTPNLHTMYFKLLFDENNHGQIRLSGGAELFMRRASLKKEELVVHPANSPIANKNPDNPKKTTTLSYDVYKDKRFSEDQYELHIPIAINKCPKNIFKINTEVRVLLKHDDNPYVIGIDRGERNLLYIVVVDGKGNIVEQYSLNEIINNFNGIRIKTDYHSLLDKKEKERFEARQNWTSIENIKELKAGYISQVVHKICELVEKYDAVIALEDLNSGFKNSRVKVEKQVYQKFEKMLIDKLNYMVDKKSNPCATGGALKGYQITNKFESFKSMSTQNGFIFYIPAWLTSKIDPSTGFVNLLKTKYTSIADSKKFISSFDRIMYVPEEDLFEFALDYKNFSRTDADYIKKWKLYSYGNRIRIFRNPKKNNVFDWEEVCLTSAYKELFNKYGINYQQGDIRALLCEQSDKAFYSSFMALMSLMLQMRNSITGRTDVDFLISPVKNSDGIFYDSRNYEAQENAILPKNADANGAYNIARKVLWAIGQFKKAEDEKLDKVKIAISNKEWLEYAQTSVKHSGGSSGGSSGSETPGTSESATPESSGGSSGGSALDFLSRLPLPPPVSPICTFVSPAAQKAFQPPRSCGSGGSKRTADGSEFEPKKKRKVGSGATNFSLLKQAGDVEENPGPSFVAGVIRRLDETVVNRIAAGEVIQRPANAIKEMIENCLDAKSTSIQVIVKEGGLKLIQIQDNGTGIRKEDLDIVCERFTTSKLQSFEDLASISTYGFRGEALASISHVAHVTITTKTADGKCAYRASYSDGKLKAPPKPCAGNQGTQITVEDLFYNIATRRKALKNPSEEYGKILEVVGRYSVHNAGISFSVKKQGETVADVRTLPNASTVDNIRSIFGNAVSRELIEIGCEDKTLAFKMNGYISNANYSVKKCIFLLFINHRLVESTSLRKAIETVYAAYLPKNTHPFLYLSLEISPQNVDVNVHPTKHEVHFLHEESILERVQQHIESKLLGSNSSRMYFTQTLLPGLAGPSGEMVKSTTSLTSSSTSGSSDKVYAHQMVRTDSREQKLDAFLQPLSKPLSSQPQAIVTEDKTDISSGRARQQDEEMLELPAPAEVAAKNQSLEGDTTKGTSEMSEKRGPTSSNPRKRHREDSDVEMVEDDSRKEMTAACTPRRRIINLTSVLSLQEEINEQGHEVLREMLHNHSFVGCVNPQWALAQHQTKLYLLNTTKLSEELFYQILIYDFANFGVLRLSEPAPLFDLAMLALDSPESGWTEEDGPKEGLAEYIVEFLKKKAEMLADYFSLEIDEEGNLIGLPLLIDNYVPPLEGLPIFILRLATEVNWDEEKECFESLSKECAMFYSIRKQYISEESTLSGQQSEVPGSIPNSWKWTVEHIVYKALRSHILPPKHFTEDGNILQLANLPDLYKVF

SEQ ID NO: 236 - protein, 677 aa, Synthetic construct
TLNIEDEYRLHETSKEPDVSLGSTWLSDFPQAWAETGGMGLAVRQAPLIILLKATSTPVSIKQYPMRQKARLGIKPHIQRLLDQGILVPCQSPWNTPLLPVKKPGTNDYRPVQDLREVNKRVEDIHPTVPNPYNLLSGLPPSHQWYTVLDLKDAFFCLRLHPTSQPLFAFEWRDPEMGISGQLTWTRLPQGFKNSPALFDEALRRDLADFRIQHPDLILLQYVDDLLLAATSELDCQQGTRALLQTLGDLGYRASAKKAQICQKQVKYLGYLLKEGQRWLTEARKETVMGQPTPKTPRQLRKFLGTAGNCRLFIPGFAEMAAPLYPLTKPGTLFNWGPDQQKAYQEIKQALLTAPALGLPDLTKPFELFVDEKQGYAKGVLTQKLGPWRRPVAYLSKKLDPVAAGWPPCLRMVAAIAVLTKDAGKLTMGQPLVIGAPHAVEALVKQPPDRWLSKARMTHYQALLLDTDRVQFGPVVALNPATLLPLPEEGLQHNCLDILAEAHGTRPDLTDQPLPDADHTWYTGGSSLLQEGQRKAGAAVTTETEVIWAKALPAGTSAQRAELIALTQALRMAEGKKLNVYTNSRYAFATAHIQGEIYRRRGLLTSEGKEIKNKDEILALLKALFLPKRLSIIHCPGHQKGHSAEARGNRMANQAARKAAITENPDTSTLPIENSSP

SEQ ID NO: 237 - protein, 677 aa, Synthetic construct
TVSLQDEHRLFDIPVTTSLPDVWLQDFPQAWAETGGLGRAKCQAPIIIDLKPTAVPVSIKQYPMSLEAHMGIRQHIIKFLELGVLRPCRSPWNTPLLPVKKPGTQDYRPVQDLREINKRTVDIHPTVPNPYNLLSTLKPDYSWYTVLDLKDAFFCLPLAPQSQELFAFEWKDPERGISGQLTWTRLPQGFKNSPTLFDEALHRDLTDFRTQHPEVTLLQYVDDLLLAAPTKKACTQGTRHLLQELGEKGYRASAKKAQICQTKVTYLGYILSEGKRWLTPGRIETVARIPPPRNPREVREFLGTAGFCRLWIPGFAELAAPLYALTKESTPFTWQTEHQLAFEALKKALLSAPALGLPDTSKPFTLFLDERQGIAKGVLTQKLGPWKRPVAYLSKKLDPVAAGWPPCLRIMAATAMLVKDSAKLTLGQPLTVITPHTLEAIVRQPPDRWITNARLTHYQALLLDTDRVQFGPPVTLNPATLLPVPENQPSPHDCRQVLAETHGTREDLKDQELPDADHTWYTDGSSYLDSGTRRAGAAVVDGHNTIWAQSLPPGTSAQKAELIALTKALELSKGKKANIYTDSRYAFATAHTHGSIYERRGLLTSEGKEIKNKAEIIALLKALFLPQEVAIIHCPGHQKGQDPVAVGNRQADRVARQAAMAEVLTLATEPDNTSHIT

SEQ ID NO: 238 - protein, 673 aa, Synthetic construct
LVLNLEEEYRLNEKPVPPSIDPSWLQLFPMVWAEKAGMGLANQVPPVVVELKSDASPVAVRQYPMSKEAREGIRPHIQRFLDLGILVPCQSPWNTPLLPVKKPGTNDYRPVQDLREVNKRVQDIHPTVPNPYNLLSSLPPSHTWYSVLDLKDAFFCLKLHPNSQPLFAFEWRDPEKGNTGQLTWTRLPQGFKNSPTLFDEALHRDLASFRALNPQVVMLQYVDDLLVAAPTYRDCKEGTRRLLQELSKLGYRVSAKKAQLCREEVTYLGYLLKGGKRWLTPARKATVMKIPTPTTPRQVREFLGTAGFCRLWIPGFASLAAPLYPLTREKVPFTWTEAHQEAFGRIKEALLSAPALALPDLTKPFALYVDEKEGVARGVLTQTLGPWRRPVAYLSKKLDPVASGWPTCLKAIAAVALLLKDADKLTLGQNVLVIAPHNLESIVRQPPDRWMTNARMTHYQSLLLNERVSFAPPAILNPATLLPVESDDTPIHICSEILAEETGTRPDLRDQPLPGVPAWYTDGSSFIMDGRRQAGAAIVDNKRTVWASNLPEGTSAQKAELIALTQALRLAEGKSINIYTDSRYAFATAHVHGAIYKQRGLLTSAGKDIKNKEEILALLEAIHLPKRVAIIHCPGHQRGTDPVATGNRKADEAAKQAAQSTRILTETTKNQEH

SEQ ID NO: 239 - protein, 673 aa, Synthetic construct
TAPLEEEYRLFLEAPIQNVTLLEQWKREIPKVWAEINPPGLASTQAPIHVQLLSTALPVRVRQYPITLEAKRSLRETIRKFRAAGILRPVHSPWNTPLLPVRKSGTSEYRMVQDLREVNKRVETIHPTVPNPYTLLSLLPPDRIWYSVLDLKDAFFCIPLAPESQLIFAFEWADAEEGESGQLTWTRLPQGFKNSPTLFDEALNRDLQGFRLDHPSVSLLQYVDDLLIAADTQAACLSATRDLLMTLAELGYRVSGKKAQLCQEEVTYLGFKIHKGSRSLSNSRTQAILQIPVPKTKRQVREFLGTIGYCRLWIPGFAELAQPLYAATRGGNDPLVWGEKEEEAFQSLKLALTQPPALALPSLDKPFQLFVEETSGAAKGVLTQALGPWKRPVAYLSKRLDPVAAGWPRCLRAIAAAALLTREASKLTFGQDIEITSSHNLESLLRSPPDKWLTNARITQYQVLLLDPPRVRFKQTAALNPATLLPETDDTLPIHHCLDTLDSLTSTRPDLTDQPLAQAEATLFTDGSSYIRDGKRYAGAAVVTLDSVIWAEPLPIGTSAQKAELIALTKALEWSKDKSVNIYTDSRYAFATLHVHGMIYRERGLLTAGGKAIKNAPEILALLTAVWLPKRVAVMHCKGHQKDDAPTSTGNRRADEVAREVAIRPLSTQATIS

SEQ ID NO: 240 - protein, 671 aa, Synthetic construct
TLNIEDEYRLHETSKGPDVPLGSTWLSDFPQAWAETGGMGLAVRQAPLIIPLRAASTPVSIKQYPMSREARLGIKPHIQRLLDQGILVPCQSPWNTPLLPVKKPGTNDYRPVQDLREVNKRVEDIHPTVPNPYNLLSGLPPSHQWYTVLDLKDAFFCLRLHPTSQSLFAFEWRDPEMGISGQLTWTRLPQGFKNSPTLFDEALHRDLADFRIQHPDLILLQYVDDLLLAATSELDCQQGTRALLQTLGDLGYRASAKKAQICQKQVKYLGYLLKEGQRWLTEARKETVMGQPTPKTPRQLREFLGTAGFCRLWIPGFAEMAAPLYPLTKTGTLFKWGPDQQKAYQEIKQALLTAPALGLPDLTKPFELFVDEKQGYAKGVLTQKLGPWRRPVAYLSKKLDPVAAGWPPCLRMVAAIAVLTKDAGKLTMGQPLVILAPHAVEALVKQPPDRWLSNARMTHYQALLLDTDRVQFGPIVTLNPATLLPLPEEGLQHDCLDILAEAHGTRPDLTDQPLPDADHTWYTDGSSFLQEGQRKAGAAVTTETEVIWAKALPAGTSAQRAELIALTQALKMAEGKKLNVYTDSRYAFATAHIHGEIYRRRGLLTSEGKEIKNKEEILALLKALFLPKRLSIIHCPGHQKGNRAEARGNRMADQAAREVATRETPETSTLL

SEQ ID NO: 241 - protein, 560 aa, Synthetic construct
PISPIETVPVKLKPGMDGPKVKQWPLTEEKIKALVEICTEMEKEGKISKIGPENPYNTPVFAIKKKDSTKWRKLVDFRELNKRTQDFWEVQLGIPHPAGLKKKKSVTVLDVGDAYFSVPLDEDFRKYTAFTIPSINNETPGIRYQYNVLPQGWKGSPAIFQSSMTKILEPFRKQNPDIVIYQYMDDLYVGSDLEIGQHRTKIEELRQHLLRWGLTTPDKKHQKEPPFLWMGYELHPDKWTVQPIVLPEKDSWTVNDIQKLVGKLNWASQIYPGIKVRQLCKLLRGTKALTEVIPLTEEAELELAENREILKEPVHGVYYDPSKDLIAEIQKQGQGQWTYQIYQEPFKNLKTGKYARMRGAHTNDVKQLTEAVQKITTESIVIWGKTPKFKLPIQKETWETWWTEYWQATWIPEWEFVNTPPLVKLWYQLEKEPIVGAETFYVDGAANRETKLGKAGYVTNRGRQKVVTLTDTTNQKTELQAIYLALQDSGLEVNIVTDSQYALGIIQAQPDQSESELVNQIIEQLIKKEKVYLAWVPAHKGIGGNEQVDKLVSAGIRKVL

SEQ ID NO: 242 - protein, 751 aa, Synthetic construct; identical to SEQ ID NO: 153

SEQ ID NO: 243 - protein, 585 aa, Synthetic construct; identical to SEQ ID NO: 154

SEQ ID NO: 244 - protein, 577 aa, Synthetic construct; identical to SEQ ID NO: 155

SEQ ID NO: 245 - DNA, 2031 bp, Synthetic construct
  source 1..2031: mol_type = other DNA
accctgaatattgaggatgaatacagactgcatgagacctctaaggaacccgatgtgagcctgggaagcacttggctgagcgacttccctcaggcatgggctgagactggaggcatgggcctggccgtgaggcaggcacctctgattatcctgctgaaggccacatccaccccagtgtcaattaagcagtaccccatgaggcagaaggcaagactgggaattaagccacacatccagagactgctggatcagggcatcctggtgccttgccagtccccttggaacacacccctgctgcctgtgaagaagcctggcaccaatgattataggccagtgcaggacctgagggaggtgaacaagagagtggaagacattcatcctaccgtgcctaacccatacaatctgctgtctggtctgcctccaagccaccagtggtatactgtgctggatctgaaggacgcattcttttgtctgaggctgcatcccacatcacagcctctgttcgcttttgagtggagagatcccgaaatgggaatctccggccagctgacttggacaaggctgccccagggtttcaagaactcacctgccctgtttgatgaggcactgagaagggatctggccgatttcaggattcagcacccagacctgatcctgctgcagtatgtggatgacctgctgctggctgccacctccgaactggattgccagcagggaactagggcactgctgcagacactgggtgacctggggtatagagcctcagcaaagaaggctcagatttgtcagaagcaggtgaagtacctgggttatctgctgaaggaggggcagaggtggctgaccgaggctagaaaggaaactgtgatggggcagcccacacctaagaccccaaggcagctgagaaagttcctgggaactgctggcaattgcaggctgttcattcccggatttgccgagatggcagctccactgtaccccctgaccaagccaggaactctgtttaactggggccccgaccagcagaaggcatatcaggaaatcaagcaggctctgctgactgctcctgccctgggcctgcctgatctgacaaagcccttcgagctgtttgtggacgaaaagcagggttacgctaagggggtgctgacccagaagctgggtccttggagaaggcccgtggcctatctgtctaagaagctggaccctgtggctgcaggatggcccccttgcctgagaatggtggctgccattgctgtgctgacaaaggacgccggaaagctgactatgggacagcctctggttattggggcaccacatgctgtggaagccctggtgaagcagccacccgataggtggctgagcaaggccagaatgacccactaccaggcactgctgctggatactgacagggtgcagttcggccccgtggtggctctgaatcctgccactctgctgccactgcccgaggaaggtctgcagcataactgtctggacatcctggcagaggctcacgggacaagacctgatctgaccgaccagcctctgccagatgccgaccatacttggtatacaggtgggtctagcctgctgcaggaaggacagaggaaggccggcgcagctgtgaccactgagacagaagtgatttgggccaaggcactgccagctggaacatctgcacagagggctgagctgatcgcactgacccaggctctgagaatggccgaaggcaagaagctgaacgtgtacaccaactctaggtatgctttcgccacagcacacattcagggtgaaatctacagaaggagaggtctgctgacaagcgaggggaaggaaattaagaataaggatgaaatcctggcactgctgaaggctctgtttctgcctaagagactgtccattatccactgtccaggacatcagaagggccactcagctgaggccaggggaaacagaatggctaatcaggccgcaaggaaggctgccattaccgagaacccagacaccagcactctgcccatcgaaaattcctcacct

SEQ ID NO: 246 - DNA, 2031 bp, Synthetic construct
  source 1..2031: mol_type = other DNA
accgtgtccctgcaggatgagcacagactgttcgacatccctgtgaccacttcactgccagacgtgtggctgcaggactttcctcaggcttgggctgaaaccggaggcctgggtagggcaaagtgccaggcaccaattatcattgatctgaagcctactgccgtgccagtgtctatcaagcagtaccctatgagcctggaggcacacatgggtattagacagcatatcattaagttcctggaactgggggtgctgagaccctgtaggtctccttggaacacacccctgctgcctgtgaagaagccaggaacccaggattacaggcccgtgcaggacctgagggagatcaataagagaacagtggatattcatcctaccgtgcccaacccttataatctgctgtccaccctgaagccagactactcatggtatactgtgctggatctgaaggacgctttcttttgcctgcctctggctcctcagagccaggagctgttcgctttcgagtggaaggaccctgagagaggtatctctgggcagctgacatggaccaggctgcctcagggattcaagaatagcccaaccctgtttgacgaggccctgcacagggatctgactgacttcagaacacagcatccagaagtgacactgctgcagtatgtggatgacctgctgctggctgcccccaccaagaaggcatgcactcagggcacaagacacctgctgcaggagctgggagaaaagggctatagggcatccgctaagaaggctcagatttgccagaccaaagtgacttacctgggttatattctgtcagaggggaagaggtggctgactcccggaagaatcgaaacagtggctaggattcctccacccagaaaccctagggaggtgagagagttcctgggtacagccgggttttgtagactgtggattcccggctttgctgagctggcagctcctctgtatgccctgaccaaggaatccacacctttcacctggcagactgaacatcagctggcttttgaggccctgaagaaggctctgctgtctgcccctgcactgggactgccagatacaagcaagcccttcaccctgtttctggacgagagacagggaatcgcaaagggcgtgctgactcagaagctgggtccttggaagaggcccgtggcttacctgtctaagaagctggaccctgttgctgcaggatggcctccatgcctgaggattatggctgccaccgcaatgctggtgaaggactctgctaagctgactctgggtcagcccctgacagtgatcacccctcacactctggaggctattgtgaggcagccccctgatagatggatcactaatgccagactgacacattatcaggcactgctgctggatactgacagggtgcagtttgggccacccgtgaccctgaaccctgccactctgctgccagtgcccgaaaatcagccttccccacacgactgtagacaggtgctggccgaaacccacggaaccagagaggatctgaaggaccaggaactgcctgatgcagaccacacttggtacacagatgggtctagctatctggactcaggaacaagaagggcaggcgcagctgtggtggatggacataacactatttgggctcagtccctgcctccaggcacatcagcacagaaggctgagctgatcgctctgactaaggccctggaactgtctaagggaaagaaggccaatatctacacagacagcagatatgctttcgccaccgcacacactcatggctccatctacgagagaaggggactgctgacctcagagggcaaggaaattaagaacaaggcagagatcattgctctgctgaaggccctgtttctgccacaggaagtggctatcattcactgcccaggtcatcagaaaggacaggaccctgtggctgtgggaaacaggcaggcagacagggtggctagacaggccgcaatggccgaggtgctgacactggcaaccgaacccgataatacctctcacattact

SEQ ID NO: 247 - DNA, 2379 bp, Synthetic construct
  source 1..2379: mol_type = other DNA
acactgggagatcagggatctaggggatctgatcctctgcccgaacctagggtgaccctgactgtggaaggcattcctactgagttcctggtggatacaggtgccgagcactctgtgctgaccaagccaatggggaagatgggaagcaagagaaccgtggtggctggcgccactggttccaaggtgtacccttggaccactaagaggctgctgaagattggacagaagcaggtgacacattctttcctggttattcctgaatgtcctgcacccctgctgggaagggatctgctgaccaagctgaaggctcagattcagttttctacagaaggaccccaggtgacctgggaggacagacctgctatgtgcctggtgctgaacctggaggaagagtataggctgcacgagaagcccgtgcctccatctatcgaccctagctggctgcagctgttcccaatggtgtgggcagaaaaggctggtatggggctggcaaatcaggtgccccctgtggtggtggagctgaagtccgatgcttcacccgtggccgtgagacagtaccctatgagcaaggaagctagagaggggattaggccacatatccagaggtttctggacctgggcattctggtgccttgccagtccccctggaacactcctctgctgccagtgaagaagccaggaacaaatgattatagacccgtgcaggacctgagagaagtgaacaagagggtgcaggatattcacccaacagtgcctaacccatacaatctgctgtctagcctgccaccctcccatacctggtattcagtgctggatctgaaggacgcattcttttgtctgaagctgcaccctaacagccagccactgttcgctttcgagtggagagatcctgagaaggggaacactggacagctgacatggaccaggctgcctcagggattcaagaactctccaacactgtttgatgaggccctgcatagagacctggcatcttttagggctctgaatccacaggttgtgatgctgcagtatgtggatgacctgctggtggctgcccctacttatagggattgcaaggaaggcacaagaaggctgctgcaggagctgtctaagctgggttacagagtgagcgccaagaaggcacagctgtgcagggaagaagtgacttacctgggctatctgctgaagggaggcaagagatggctgactcccgctaggaaggccacagtgatgaagattcccacccctacaacccctagacaggtgagggagttcctgggcactgccggtttttgcagactgtggattcctggtttcgcaagcctggcagctcccctgtatcctctgacaagagaaaaggtgcctttcacttggacagaagcccaccaggaggcatttgggaggattaaggaggctctgctgtccgcaccagctctggccctgcccgatctgaccaagccttttgctctgtatgtggatgaaaaagaaggagtggccaggggagtgctgacccagactctgggcccctggagaaggcctgtggcatatctgtctaagaagctggaccctgtggcttcaggttggccaacctgcctgaaggcaatcgccgcagtggctctgctgctgaaggatgccgacaagctgactctgggacagaacgtgctggttattgcaccacacaatctggaatctatcgtgagacagcctccagacaggtggatgaccaatgctagaatgactcattaccagtctctgctgctgaacgagagggtgagcttcgcaccccctgctattctgaatccagccacactgctgcccgtggaatccgatgacacccctattcacatctgttcagagatcctggccgaagagacaggcaccagacctgatctgagagaccagccactgcctggggtgccagcatggtataccgatggatcttctttcattatggatgggagaaggcaggctggagctgccatcgtggataacaagagaaccgtgtgggcctccaatctgccagaagggacttcagcccagaaggcagagctgattgctctgacccaggccctgagactggcagagggaaagtctattaacatctacaccgatagcaggtatgcattcgctactgcccacgtgcatggcgctatctacaagcagagaggcctgctgacttcagccggaaaggacattaagaataaggaagagatcctggctctgctggaggccatccatctgcctaagagggtggccattatccactgtccaggccatcagagaggtacagatcccgtggccaccggcaacaggaaggcagacgaagcagctaagcaggccgcacagtctactaggattctgacagagactacaaagaat

SEQ ID NO: 248 - DNA, 2019 bp, Synthetic construct
  source 1..2019: mol_type = other DNA
accgctcctctggaggaagagtacagactgttcctggaagcacctattcagaacgtgactctgctggagcagtggaagagggaaattcctaaagtgtgggccgagatcaatcctccaggactggcttccacacaggccccaattcacgtgcagctgctgtcaaccgccctgcccgtgagagtgaggcagtaccctatcacactggaggcaaagaggtctctgagggaaaccattagaaagtttagggctgccggaatcctgagacccgtgcacagcccttggaacactccactgctgcccgtgagaaagtccggcacatcagagtataggatggtgcaggatctgagagaggtgaacaagagggtggaaaccattcatcctactgtgccaaatccctacaccctgctgtctctgctgccccctgacagaatctggtatagcgtgctggatctgaaggacgctttcttttgcattcctctggccccagagtcccagctgatcttcgcctttgaatgggcagatgctgaagagggagagtctggccagctgacctggactaggctgccacagggattcaagaacagccccactctgtttgatgaagctctgaatagagacctgcagggcttcaggctggaccacccatctgtgagcctgctgcagtatgtggatgacctgctgattgcagctgatacacaggccgcatgcctgtccgccactagagacctgctgatgacactggcagagctgggttacagggtgtcagggaagaaggcccagctgtgccaggaagaagtgacttatctgggttttaagatccataaggggtccagatcactgtctaacagcaggacacaggctattctgcagatccctgtgccaaagaccaagagacaggtgagggagttcctgggtactattgggtactgtagactgtggattcctggttttgcagagctggctcagccactgtatgctgccacaaggggaggcaatgatcctctggtgtggggagagaaggaagaggaagcattccagtctctgaagctggctctgactcagccacccgccctggcactgccttccctggacaagccattccagctgtttgtggaggaaacctcaggagcagctaagggcgtgctgactcaggctctgggtccttggaagagacccgtggcctacctgtctaagagactggaccctgttgctgcaggatggccaagatgcctgagggcaatcgctgccgcagctctgctgaccagagaggcttctaagctgaccttcggacaggacattgaaatcacctctagccataacctggagtccctgctgagatcacctccagacaagtggctgacaaatgccaggattacccagtatcaggtgctgctgctggaccctcctagagtgagattcaagcagacagccgcactgaaccccgctaccctgctgcctgagaccgatgacactctgccaatccaccattgtctggataccctggactctctgacaagcaccaggcctgatctgactgaccagccactggctcaggccgaagcaacactgttcaccgatggctcctcatacattagagacggaaagaggtatgctggagctgccgtggtgactctggattctgtgatttgggctgagcccctgcctatcggtactagcgcccagaaggcagaactgattgcactgacaaaggctctggagtggtctaaggataagagcgtgaacatctacactgattctaggtatgcttttgccacactgcacgtgcatggaatgatctacagagaaaggggcctgctgacagccggtgggaaggcaattaagaatgctccagagatcctggccctgctgactgcagtgtggctgcccaagagggtggctgtgatgcactgcaagggtcatcagaaggatgacgcccccactagcacagggaatagaagggctgatgaggtggccagagaagtggcaattaggccactgtccactcaggctacaatctca

SEQ ID NO: 249 - DNA, 2013 bp, Synthetic construct
  source 1..2013: mol_type = other DNA
accctgaatattgaggatgaatacagactgcacgagacctccaagggacccgatgtgcctctgggctctacttggctgagcgacttccctcaggcatgggctgaaaccggaggcatgggcctggccgtgaggcaggcacccctgattatccctctgagagctgcctccactccagtgtctattaagcagtacccaatgtctagggaggccagactgggaattaagccacatatccagagactgctggatcagggcatcctggtgccatgccagagcccctggaacacaccactgctgcccgtgaagaagcccgggaccaatgattataggcctgtgcaggacctgagggaggtgaacaagagagtggaagacattcacccaaccgtgcctaacccatacaatctgctgtctggactgcctccaagccatcagtggtatactgtgctggatctgaaggacgcattcttttgtctgaggctgcaccccacatcccagtcactgttcgcttttgagtggagagaccctgaaatgggtatctccgggcagctgacatggaccaggctgccacagggcttcaagaactcacccacactgtttgatgaggcactgcacagggatctggctgatttcaggattcagcatcctgacctgatcctgctgcagtatgtggatgacctgctgctggcagctacctccgaactggattgccagcagggtactagggctctgctgcagacactgggagacctgggctatagagcctcagcaaagaaggcccagatttgccagaagcaggtgaagtacctgggttatctgctgaaggaggggcagaggtggctgaccgaggctagaaaggaaactgtgatgggccagcccacccctaagactccaaggcagctgagagagttcctgggaaccgctgggttttgcaggctgtggattcccggtttcgccgaaatggccgcacctctgtacccactgactaagacaggaaccctgtttaagtggggcccagatcagcagaaggcttatcaggaaatcaagcaggccctgctgactgctcccgccctgggtctgcctgatctgacaaagccattcgagctgtttgtggacgaaaagcagggatacgccaagggcgtgctgactcagaagctgggaccttggagaaggccagtggcatatctgtctaagaagctggaccctgtggctgctggatggcccccttgcctgagaatggtggcagctattgccgtgctgacaaaggacgcaggaaagctgactatgggacagcccctggttattctggcacctcacgctgtggaggccctggtgaagcagccacccgacaggtggctgagcaatgcaagaatgacccattaccaggctctgctgctggatactgacagggtgcagttcgggccaattgtgaccctgaaccctgccactctgctgccactgcctgaggaaggtctgcagcacgattgtctggacatcctggcagaggctcatgggacaagacccgatctgaccgaccagcctctgccagatgctgaccatacatggtataccgatggctctagctttctgcaggagggtcagaggaaggcaggggccgcagtgaccactgagactgaagtgatttgggccaaggcactgcctgctggtacatctgcacagagagctgagctgatcgctctgacccaggccctgaagatggcagaaggaaagaagctgaacgtgtacactgactctaggtatgctttcgccacagcacacattcatggagaaatctacagaaggagaggtctgctgacaagcgaggggaaggaaattaagaacaaggaggaaatcctggctctgctgaaggccctgtttctgcctaagagactgtccattatccactgtccaggtcatcagaaggggaacagggctgaggccaggggaaatagaatggccgatcaggctgccagggaagtggctactagagagacaccagaaacttcaacactgctg

SEQ ID NO: 250 - DNA, 1680 bp, Synthetic construct
  source 1..1680: mol_type = other DNA
cctatttctccaatcgagaccgtgcctgtgaagctgaagccaggcatggatggccccaaggtgaagcagtggccactgacagaggaaaagattaaggctctggtggagatttgcaccgagatggaaaaggagggaaagatttctaagattgggcccgaaaacccttacaataccccagtgttcgctattaagaagaaggattcaactaagtggagaaagctggtggacttcagagaactgaacaagaggactcaggacttttgggaagtgcagctgggcattcctcaccctgcaggactgaagaagaagaagtctgtgacagtgctggatgtgggagacgcttacttttcagtgccactggatgaagacttcagaaagtatacagcctttaccattccatctatcaacaatgagacccccggaattagataccagtataacgtgctgcctcagggttggaaggggagcccagcaattttccagtctagcatgactaagatcctggagccctttagaaagcagaatcctgatattgtgatctaccagtatatggatgacctgtatgtgggtagcgacctggaaattgggcagcacaggactaagatcgaggaactgagacagcatctgctgagatggggtctgaccactccagataagaagcaccagaaggaacctccattcctgtggatggggtacgagctgcatcccgacaagtggactgtgcagccaattgtgctgcccgagaaggattcttggacagtgaacgacatccagaagctggtgggaaagctgaattgggccagccaaatctaccccggcatcaaggtgagacagctgtgcaagctgctgaggggtactaaggcactgacagaagtgattcctctgaccgaggaagctgaactggagctggccgaaaacagggagatcctgaaggaacccgtgcacggcgtgtactatgatccttccaaggacctgattgctgagatccagaagcagggtcaggggcagtggacctaccaaatctaccaggaacctttcaagaacctgaagactggaaagtacgcaagaatgaggggcgctcataccaatgatgtgaagcagctgactgaagcagtgcagaagattacaaccgagtcaattgtgatctggggaaagacacctaagtttaagctgccaatccagaaggaaacttgggagacatggtggaccgagtattggcaggctacttggattcctgaatgggagttcgtgaatacaccccctctggtgaagctgtggtatcagctggaaaaggagccaatcgtgggtgcagaaaccttttatgtggatggggctgccaacagagagacaaagctgggaaaggctggctacgtgaccaatagaggaaggcagaaggtggtgaccctgactgacactacaaaccagaagacagaactgcaggcaatctacctggctctgcaggattctggtctggaggttaatatcgtgaccgacagccagtatgccctggggattatccaggcacagccagatcagtccgaatcagagctggtgaaccagattatcgaacagctgattaagaaggagaaggtgtatctggcctgggtgcccgcacataagggaattggaggcaatgagcaggtggacaagctggtgtctgccggcatcaggaaggtgctg

SEQ ID NO: 251 - DNA, 2253 bp, Synthetic construct; identical to SEQ ID NO: 191
  source 1..2253: mol_type = other DNA

SEQ ID NO: 252 - DNA, 1755 bp, Synthetic construct; identical to SEQ ID NO: 192
  source 1..1755: mol_type = other DNA

SEQ ID NO: 253 - DNA, 1731 bp, Synthetic construct; identical to SEQ ID NO: 193
  source 1..1731: mol_type = other DNA

SEQ ID NO: 254 - protein, 1315 aa, Synthetic construct
SKLEKFTNCYSLSKTLRFKAIPVGKTQENIDNKRLLVEDEKRAEDYKGVKKLLDRYYLSFINDVLHSIKLKNLNNYISLFRKKTRTEKENKELENLEINLRKEIAKAFKGNEGYKSLFKKDIIETILPEFLDDKDEIALVNSFNGFTTAFTGFFDNRENMFSEEAKSTSIAFRCINENLTRYISNMDIFEKVDAIFDKHEVQEIKEKILNSDYDVEDFFEGEFFNFVLTQEGIDVYNAIIGGFVTESGEKIKGLNEYINLYNQKTKQKLPKFKPLYKQVLSDRESLSFYGEGSSGIDGVKLSSTEKKKMDEIAPPKGSVFTCPICEKRSIVGVTANLVHDHNHDTGWGREWICDSCNTGLGRFKDNPKFLEKVIEYLKKGYTSDEEVLEVFRNTLNKNSEIFSSIKKLEKLFKNFDEYSSAGIFVKNGPAISTISKDIFGEWNVIRDKWNAEYDDIHLKKKAVVTEKYEDDRRKSFKKIGSFSLEQLQEYADADLSVVEKLKEIIIQKVDEIYKVYGSSEKLFDADFVLEKSLKKNDAVVAIMKDLLDSVKSFENYIKAFFGEGKETNRDESFYGDFVLAYDILLKVDHIYDAIRNYVTQKPYSKDKFKLYFQNPQFMGGWDKDKETDYRATILRYGSKYYLAIMDKKYAKCLQKIDKDDVNGNYEKINYKLLPGPNKMLPKVFFSKKWMAYYNPSEDIQKIYKNGTFKKGDMFNLNDCHKLIDFFKDSISRYPKWSNAYDFNFSETEKYKDIAGFYREVEEQGYKVSFESASKKEVDKLVEEGKLYMFQIYNKDFSDKSHGTPNLHTMYFKLLFDENNHGQIRLSGGAELFMRRASLKKEELVVHPANSPIANKNPDNPKKTTTLSYDVYKDKRFSEDQYELHIPIAINKCPKNIFKINTEVRVLLKHDDNPYVIGIARGERNLLYIVVVDGKGNIVEQYSLNEIINNFNGIRIKTDYHSLLDKKEKERFEARQNWTSIENIKELKAGYISQVVHKICELVEKYDAVIALEDLNSGFKNSRVKVEKQVYQKFEKMLIDKLNYMVDKKSNPCATGGALKGYQITNKFESFKSMSTQNGFIFYIPAWLTSKIDPSTGFVNLLKTKYTSIADSKKFISSFDRIMYVPEEDLFEFALDYKNFSRTDADYIKKWKLYSYGNRIRIFRNPKKNNVFDWEEVCLTSAYKELFNKYGINYQQGDIRALLCEQSDKAFYSSFMALMSLMLQMRNSITGRTDVDFLISPVKNSDGIFYDSRNYEAQENAILPKNADANGAYNIARKVLWAIGQFKKAEDEKLDKVKIAISNKEWLEYAQTSVKH

SEQ ID NO: 255 - protein, 1501 aa, Synthetic construct
SKLEKFTNCYSLSKTLRFKAIPVGKTQENIDNKRLLVEDEKRAEDYKGVKKLLDRYYLSFINDVLHSIKLKNLNNYISLFRKKTRTEKENKELENLEINLRKEIAKAFKGNEGYKSLFKKDIIETILPEFLDDKDEIALVNSFNGFTTAFTGFFDNRENMFSEEAKSTSIAFRCINENLTRYISNMDIFEKVDAIFDKHEVQEIKEKILNSDYDVEDFFEGEFFNFVLTQEGIDVYNAIIGGFVTESGEKIKGLNEYINLYNQKTKQKLPKFKPLYKQVLSDRESLSFYGEGSSGAAPNIHGWGKEGHEIICKIAQTRLDETAAKAVKELLPESAEGDLSSLCLWADRVKFRYHWSSPLHYINTPDACSYQYNRDCKDESGEKGRCVAGAIYNYTTQLLSYKTAASSQSQYNLTEALLFVSHFMGDIHQPLHVSYASDKGGNTIEVHWYTRKANLHHIWDSNIIETAEADLYNSALEGMVDALKKNITTEWADQVKRWETCTKKTACPDIYASEGIQAACDWAYKGVTEGDTLEDEYFYSRLPIVYQRLAQGGVRLAATLNRIFGGYTSDEEVLEVFRNTLNKNSEIFSSIKKLEKLFKNFDEYSSAGIFVKNGPAISTISKDIFGEWNVIRDKWNAEYDDIHLKKKAVVTEKYEDDRRKSFKKIGSFSLEQLQEYADADLSVVEKLKEIIIQKVDEIYKVYGSSEKLFDADFVLEKSLKKNDAVVAIMKDLLDSVKSFENYIKAFFGEGKETNRDESFYGDFVLAYDILLKVDHIYDAIRNYVTQKPYSKDKFKLYFQNPQFMGGWDKDKETDYRATILRYGSKYYLAIMDKKYAKCLQKIDKDDVNGNYEKINYKLLPGPNKMLPKVFFSKKWMAYYNPSEDIQKIYKNGTFKKGDMFNLNDCHKLIDFFKDSISRYPKWSNAYDFNFSETEKYKDIAGFYREVEEQGYKVSFESASKKEVDKLVEEGKLYMFQIYNKDFSDKSHGTPNLHTMYFKLLFDENNHGQIRLSGGAELFMRRASLKKEELVVHPANSPIANKNPDNPKKTTTLSYDVYKDKRFSEDQYELHIPIAINKCPKNIFKINTEVRVLLKHDDNPYVIGIARGERNLLYIVVVDGKGNIVEQYSLNEIINNFNGIRIKTDYHSLLDKKEKERFEARQNWTSIENIKELKAGYISQVVHKICELVEKYDAVIALEDLNSGFKNSRVKVEKQVYQKFEKMLIDKLNYMVDKKSNPCATGGALKGYQITNKFESFKSMSTQNGFIFYIPAWLTSKIDPSTGFVNLLKTKYTSIADSKKFISSFDRIMYVPEEDLFEFALDYKNFSRTDADYIKKWKLYSYGNRIRIFRNPKKNNVFDWEEVCLTSAYKELFNKYGINYQQGDIRALLCEQSDKAFYSSFMALMSLMLQMRNSITGRTDVDFLISPVKNSDGIFYDSRNYEAQENAILPKNADANGAYNIARKVLWAIGQFKKAEDEKLDKVKIAISNKEWLEYAQTSVKH

SEQ ID NO: 256 - protein, 1454 aa, Synthetic construct
SKLEKFTNCYSLSKTLRFKAIPVGKTQENIDNKRLLVEDEKRAEDYKGVKKLLDRYYLSFINDVLHSIKLKNLNNYISLFRKKTRTEKENKELENLEINLRKEIAKAFKGNEGYKSLFKKDIIETILPEFLDDKDEIALVNSFNGFTTAFTGFFDNRENMFSEEAKSTSIAFRCINENLTRYISNMDIFEKVDAIFDKHEVQEIKEKILNSDYDVEDFFEGEFFNFVLTQEGIDVYNAIIGGFVTESGEKIKGLNEYINLYNQKTKQKLPKFKPLYKQVLSDRESLSFYGEGSSGARVRTYPNVSHANTHYKNTVSSKLLPFTANYQLQLGELDNLNRATFSHIQLQDRHETKDVRTKINYDPVGWHNYQFPYGDGSKSSWVMNRGHLVGYQFCGLNDEPRNLVAMTAWLNTGAYSGANDSNPEGMLYYENRLDSWLALHPDFWLDYKVTPIYSGNEVVPRQIELQYVGIDSSGELLTIRLNSNKESIDENGVTTVILENSAPNINLDYLNGTATPKNGYTSDEEVLEVFRNTLNKNSEIFSSIKKLEKLFKNFDEYSSAGIFVKNGPAISTISKDIFGEWNVIRDKWNAEYDDIHLKKKAVVTEKYEDDRRKSFKKIGSFSLEQLQEYADADLSVVEKLKEIIIQKVDEIYKVYGSSEKLFDADFVLEKSLKKNDAVVAIMKDLLDSVKSFENYIKAFFGEGKETNRDESFYGDFVLAYDILLKVDHIYDAIRNYVTQKPYSKDKFKLYFQNPQFMGGWDKDKETDYRATILRYGSKYYLAIMDKKYAKCLQKIDKDDVNGNYEKINYKLLPGPNKMLPKVFFSKKWMAYYNPSEDIQKIYKNGTFKKGDMFNLNDCHKLIDFFKDSISRYPKWSNAYDFNFSETEKYKDIAGFYREVEEQGYKVSFESASKKEVDKLVEEGKLYMFQIYNKDFSDKSHGTPNLHTMYFKLLFDENNHGQIRLSGGAELFMRRASLKKEELVVHPANSPIANKNPDNPKKTTTLSYDVYKDKRFSEDQYELHIPIAINKCPKNIFKINTEVRVLLKHDDNPYVIGIARGERNLLYIVVVDGKGNIVEQYSLNEIINNFNGIRIKTDYHSLLDKKEKERFEARQNWTSIENIKELKAGYISQVVHKICELVEKYDAVIALEDLNSGFKNSRVKVEKQVYQKFEKMLIDKLNYMVDKKSNPCATGGALKGYQITNKFESFKSMSTQNGFIFYIPAWLTSKIDPSTGFVNLLKTKYTSIADSKKFISSFDRIMYVPEEDLFEFALDYKNFSRTDADYIKKWKLYSYGNRIRIFRNPKKNNVFDWEEVCLTSAYKELFNKYGINYQQGDIRALLCEQSDKAFYSSFMALMSLMLQMRNSITGRTDVDFLISPVKNSDGIFYDSRNYEAQENAILPKNADANGAYNIARKVLWAIGQFKKAEDEKLDKVKIAISNKEWLEYAQTSVKH

SEQ ID NO: 257 - protein, 1375 aa, Synthetic construct
SKLEKFTNCYSLSKTLRFKAIPVGKTQENIDNKRLLVEDEKRAEDYKGVKKLLDRYYLSFINDVLHSIKLKNLNNYISLFRKKTRTEKENKELENLEINLRKEIAKAFKGNEGYKSLFKKDIIETILPEFLDDKDEIALVNSFNGFTTAFTGFFDNRENMFSEEAKSTSIAFRCINENLTRYISNMDIFEKVDAIFDKHEVQEIKEKILNSDYDVEDFFEGEFFNFVLTQEGIDVYNAIIGGFVTESGEKIKGLNEYINLYNQKTKQKLPKFKPLYKQVLSDRESLSFYGEGSSGENQTTGKGKNNSRPRYKSLEKAIKEFGSQILKEHPTDNQELRNNRLYLYYLQNGKDMYTGQDLDIHNLSNYDIDHIVPQSFITDNSIDNLVLTSSAGNREKGDDVPPLEIVRKRKVFWEKLYQGNLMSKRKFDYLTKAERGGLTGYTSDEEVLEVFRNTLNKNSEIFSSIKKLEKLFKNFDEYSSAGIFVKNGPAISTISKDIFGEWNVIRDKWNAEYDDIHLKKKAVVTEKYEDDRRKSFKKIGSFSLEQLQEYADADLSVVEKLKEIIIQKVDEIYKVYGSSEKLFDADFVLEKSLKKNDAVVAIMKDLLDSVKSFENYIKAFFGEGKETNRDESFYGDFVLAYDILLKVDHIYDAIRNYVTQKPYSKDKFKLYFQNPQFMGGWDKDKETDYRATILRYGSKYYLAIMDKKYAKCLQKIDKDDVNGNYEKINYKLLPGPNKMLPKVFFSKKWMAYYNPSEDIQKIYKNGTFKKGDMFNLNDCHKLIDFFKDSISRYPKWSNAYDFNFSETEKYKDIAGFYREVEEQGYKVSFESASKKEVDKLVEEGKLYMFQIYNKDFSDKSHGTPNLHTMYFKLLFDENNHGQIRLSGGAELFMRRASLKKEELVVHPANSPIANKNPDNPKKTTTLSYDVYKDKRFSEDQYELHIPIAINKCPKNIFKINTEVRVLLKHDDNPYVIGIARGERNLLYIVVVDGKGNIVEQYSLNEIINNFNGIRIKTDYHSLLDKKEKERFEARQNWTSIENIKELKAGYISQVVHKICELVEKYDAVIALEDLNSGFKNSRVKVEKQVYQKFEKMLIDKLNYMVDKKSNPCATGGALKGYQITNKFESFKSMSTQNGFIFYIPAWLTSKIDPSTGFVNLLKTKYTSIADSKKFISSFDRIMYVPEEDLFEFALDYKNFSRTDADYIKKWKLYSYGNRIRIFRNPKKNNVFDWEEVCLTSAYKELFNKYGINYQQGDIRALLCEQSDKAFYSSFMALMSLMLQMRNSITGRTDVDFLISPVKNSDGIFYDSRNYEAQENAILPKNADANGAYNIARKVLWAIGQFKKAEDEKLDKVKIAISNKEWLEYAQTSVKH

SEQ ID NO: 258 - protein, 1375 aa, Synthetic construct
SKLEKFTNCYSLSKTLRFKAIPVGKTQENIDNKRLLVEDEKRAEDYKGVKKLLDRYYLSFINDVLHSIKLKNLNNYISLFRKKTRTEKENKELENLEINLRKEIAKAFKGNEGYKSLFKKDIIETILPEFLDDKDEIALVNSFNGFTTAFTGFFDNRENMFSEEAKSTSIAFRCINENLTRYISNMDIFEKVDAIFDKHEVQEIKEKILNSDYDVEDFFEGEFFNFVLTQEGIDVYNAIIGGFVTESGEKIKGLNEYINLYNQKTKQKLPKFKPLYKQVLSDRESLSFYGEGSSGENQFTNQGRRNSQQRLKGLTDSIKEFGSQILKEHPVENSQLQNDRLFLYYLQNGRDMYTGEELDIDYLSQYDIDHIIPQAFIKDNSIDNRVLTSSKENRGKSDDVPSKDVVRKMKSYWSKLLSAKLITQRKFDNLTKAERGGLTGYTSDEEVLEVFRNTLNKNSEIFSSIKKLEKLFKNFDEYSSAGIFVKNGPAISTISKDIFGEWNVIRDKWNAEYDDIHLKKKAVVTEKYEDDRRKSFKKIGSFSLEQLQEYADADLSVVEKLKEIIIQKVDEIYKVYGSSEKLFDADFVLEKSLKKNDAVVAIMKDLLDSVKSFENYIKAFFGEGKETNRDESFYGDFVLAYDILLKVDHIYDAIRNYVTQKPYSKDKFKLYFQNPQFMGGWDKDKETDYRATILRYGSKYYLAIMDKKYAKCLQKIDKDDVNGNYEKINYKLLPGPNKMLPKVFFSKKWMAYYNPSEDIQKIYKNGTFKKGDMFNLNDCHKLIDFFKDSISRYPKWSNAYDFNFSETEKYKDIAGFYREVEEQGYKVSFESASKKEVDKLVEEGKLYMFQIYNKDFSDKSHGTPNLHTMYFKLLFDENNHGQIRLSGGAELFMRRASLKKEELVVHPANSPIANKNPDNPKKTTTLSYDVYKDKRFSEDQYELHIPIAINKCPKNIFKINTEVRVLLKHDDNPYVIGIARGERNLLYIVVVDGKGNIVEQYSLNEIINNFNGIRIKTDYHSLLDKKEKERFEARQNWTSIENIKELKAGYISQVVHKICELVEKYDAVIALEDLNSGFKNSRVKVEKQVYQKFEKMLIDKLNYMVDKKSNPCATGGALKGYQITNKFESFKSMSTQNGFIFYIPAWLTSKIDPSTGFVNLLKTKYTSIADSKKFISSFDRIMYVPEEDLFEFALDYKNFSRTDADYIKKWKLYSYGNRIRIFRNPKKNNVFDWEEVCLTSAYKELFNKYGINYQQGDIRALLCEQSDKAFYSSFMALMSLMLQMRNSITGRTDVDFLISPVKNSDGIFYDSRNYEAQENAILPKNADANGAYNIARKVLWAIGQFKKAEDEKLDKVKIAISNKEWLEYAQTSVKH

SEQ ID NO: 259 - protein, 1398 aa, Synthetic construct
SKLEKFTNCYSLSKTLRFKAIPVGKTQENIDNKRLLVEDEKRAEDYKGVKKLLDRYYLSFINDVLHSIKLKNLNNYISLFRKKTRTEKENKELENLEINLRKEIAKAFKGNEGYKSLFKKDIIETILPEFLDDKDEIALVNSFNGFTTAFTGFFDNRENMFSEEAKSTSIAFRCINENLTRYISNMDIFEKVDAIFDKHEVQEIKEKILNSDYDVEDFFEGEFFNFVLTQEGIDVYNAIIGGFVTESGEKIKGLNEYINLYNQKTKQKLPKFKPLYKQVLSDRESLSFYGEGSSGVREGFVTEKRAREMDGDMRRRAARNAKLFQEMQEKLNVQGKPSRADLWRYQSVQRQNCQCAYCGSPITFSNSEMDHIVPRAGQGSTNTRENLVAVCHRCNQSKGNTPFAIWAKNTSIEGVSVKEAVERTRHWVTDTGMRSTDFKKFTKAVVERFQRATMDEEIDARSGYTSDEEVLEVFRNTLNKNSEIFSSIKKLEKLFKNFDEYSSAGIFVKNGPAISTISKDIFGEWNVIRDKWNAEYDDIHLKKKAVVTEKYEDDRRKSFKKIGSFSLEQLQEYADADLSVVEKLKEIIIQKVDEIYKVYGSSEKLFDADFVLEKSLKKNDAVVAIMKDLLDSVKSFENYIKAFFGEGKETNRDESFYGDFVLAYDILLKVDHIYDAIRNYVTQKPYSKDKFKLYFQNPQFMGGWDKDKETDYRATILRYGSKYYLAIMDKKYAKCLQKIDKDDVNGNYEKINYKLLPGPNKMLPKVFFSKKWMAYYNPSEDIQKIYKNGTFKKGDMFNLNDCHKLIDFFKDSISRYPKWSNAYDFNFSETEKYKDIAGFYREVEEQGYKVSFESASKKEVDKLVEEGKLYMFQIYNKDFSDKSHGTPNLHTMYFKLLFDENNHGQIRLSGGAELFMRRASLKKEELVVHPANSPIANKNPDNPKKTTTLSYDVYKDKRFSEDQYELHIPIAINKCPKNIFKINTEVRVLLKHDDNPYVIGIARGERNLLYIVVVDGKGNIVEQYSLNEIINNFNGIRIKTDYHSLLDKKEKERFEARQNWTSIENIKELKAGYISQVVHKICELVEKYDAVIALEDLNSGFKNSRVKVEKQVYQKFEKMLIDKLNYMVDKKSNPCATGGALKGYQITNKFESFKSMSTQNGFIFYIPAWLTSKIDPSTGFVNLLKTKYTSIADSKKFISSFDRIMYVPEEDLFEFALDYKNFSRTDADYIKKWKLYSYGNRIRIFRNPKKNNVFDWEEVCLTSAYKELFNKYGINYQQGDIRALLCEQSDKAFYSSFMALMSLMLQMRNSITGRTDVDFLISPVKNSDGIFYDSRNYEAQENAILPKNADANGAYNIARKVLWAIGQFKKAEDEKLDKVKIAISNKEWLEYAQTSVKH

SEQ ID NO: 260 - protein, 1491 aa, Synthetic construct
SKLEKFTNCYSLSKTLRFKAIPVGKTQENIDNKRLLVEDEKRAEDYKGVKKLLDRYYLSFINDVLHSIKLKNLNNYISLFRKKTRTEKENKELENLEINLRKEIAKAFKGNEGYKSLFKKDIIETILPEFLDDKDEIALVNSFNGFTTAFTGFFDNRENMFSEEAKSTSIAFRCINENLTRYISNMDIFEKVDAIFDKHEVQEIKEKILNSDYDVEDFFEGEFFNFVLTQEGIDVYNAIIGGFVTESGEKIKGLNEYINLYNQKTKQKLPKFKPLYKQVLSDRESLSFYGEGSSGGKAQLDIKNFPELYRTTERVYKKSGQSTKPVTVSNIHYSVLDGYGRSGEAYGIITKDMIDMSAGYREKWESKPEPSGWYSYFFKNTNQRATESDYKHSPKNVSKISNNIKASILLSNGNVRNGYLFDRSHLIADSLGGRPFRNNLITGTRTQNVGNNDRKGGMQYIENKVLDHIKRNPKVHVYYKATPVYQGSELLPRAVLVSALSSDGFIDETVRVFNNVAGFNIDYQNGGLLSSTADVDINNVEENEIETTDDEIEEGGYTSDEEVLEVFRNTLNKNSEIFSSIKKLEKLFKNFDEYSSAGIFVKNGPAISTISKDIFGEWNVIRDKWNAEYDDIHLKKKAVVTEKYEDDRRKSFKKIGSFSLEQLQEYADADLSVVEKLKEIIIQKVDEIYKVYGSSEKLFDADFVLEKSLKKNDAVVAIMKDLLDSVKSFENYIKAFFGEGKETNRDESFYGDFVLAYDILLKVDHIYDAIRNYVTQKPYSKDKFKLYFQNPQFMGGWDKDKETDYRATILRYGSKYYLAIMDKKYAKCLQKIDKDDVNGNYEKINYKLLPGPNKMLPKVFFSKKWMAYYNPSEDIQKIYKNGTFKKGDMFNLNDCHKLIDFFKDSISRYPKWSNAYDFNFSETEKYKDIAGFYREVEEQGYKVSFESASKKEVDKLVEEGKLYMFQIYNKDFSDKSHGTPNLHTMYFKLLFDENNHGQIRLSGGAELFMRRASLKKEELVVHPANSPIANKNPDNPKKTTTLSYDVYKDKRFSEDQYELHIPIAINKCPKNIFKINTEVRVLLKHDDNPYVIGIARGERNLLYIVVVDGKGNIVEQYSLNEIINNFNGIRIKTDYHSLLDKKEKERFEARQNWTSIENIKELKAGYISQVVHKICELVEKYDAVIALEDLNSGFKNSRVKVEKQVYQKFEKMLIDKLNYMVDKKSNPCATGGALKGYQITNKFESFKSMSTQNGFIFYIPAWLTSKIDPSTGFVNLLKTKYTSIADSKKFISSFDRIMYVPEEDLFEFALDYKNFSRTDADYIKKWKLYSYGNRIRIFRNPKKNNVFDWEEVCLTSAYKELFNKYGINYQQGDIRALLCEQSDKAFYSSFMALMSLMLQMRNSITGRTDVDFLISPVKNSDGIFYDSRNYEAQENAILPKNADANGAYNIARKVLWAIGQFKKAEDEKLDKVKIAISNKEWLEYAQTSVKH

SEQ ID NO: 261 - protein, 1351 aa, Synthetic construct
SKLEKFTNCYSLSKTLRFKAIPVGKTQENIDNKRLLVEDEKRAEDYKGVKKLLDRYYLSFINDVLHSIKLKNLNNYISLFRKKTRTEKENKELENLEINLRKEIAKAFKGNEGYKSLFKKDIIETILPEFLDDKDEIALVNSFNGFTTAFTGFFDNRENMFSEEAKSTSIAFRCINENLTRYISNMDIFEKVDAIFDKHEVQEIKEKILNSDYDVEDFFEGEFFNFVLTQEGIDVYNAIIGGFVTESGEKIKGLNEYINLYNQKTKQKLPKFKPLYKQVLSDRESLSFYGEGSSGSNNSYLRAKVFETEHGVCQLCNVNAQELFLRLRDAPKSQRKNLLYATWTSKLPLEQLNEMIRNPGEGHFWQVDHIKPVYGGGGQCSLDNLQTLCTVCHKERTARQAKERSQVRRQSLASKGYTSDEEVLEVFRNTLNKNSEIFSSIKKLEKLFKNFDEYSSAGIFVKNGPAISTISKDIFGEWNVIRDKWNAEYDDIHLKKKAVVTEKYEDDRRKSFKKIGSFSLEQLQEYADADLSVVEKLKEIIIQKVDEIYKVYGSSEKLFDADFVLEKSLKKNDAVVAIMKDLLDSVKSFENYIKAFFGEGKETNRDESFYGDFVLAYDILLKVDHIYDAIRNYVTQKPYSKDKFKLYFQNPQFMGGWDKDKETDYRATILRYGSKYYLAIMDKKYAKCLQKIDKDDVNGNYEKINYKLLPGPNKMLPKVFFSKKWMAYYNPSEDIQKIYKNGTFKKGDMFNLNDCHKLIDFFKDSISRYPKWSNAYDFNFSETEKYKDIAGFYREVEEQGYKVSFESASKKEVDKLVEEGKLYMFQIYNKDFSDKSHGTPNLHTMYFKLLFDENNHGQIRLSGGAELFMRRASLKKEELVVHPANSPIANKNPDNPKKTTTLSYDVYKDKRFSEDQYELHIPIAINKCPKNIFKINTEVRVLLKHDDNPYVIGIARGERNLLYIVVVDGKGNIVEQYSLNEIINNFNGIRIKTDYHSLLDKKEKERFEARQNWTSIENIKELKAGYISQVVHKICELVEKYDAVIALEDLNSGFKNSRVKVEKQVYQKFEKMLIDKLNYMVDKKSNPCATGGALKGYQITNKFESFKSMSTQNGFIFYIPAWLTSKIDPSTGFVNLLKTKYTSIADSKKFISSFDRIMYVPEEDLFEFALDYKNFSRTDADYIKKWKLYSYGNRIRIFRNPKKNNVFDWEEVCLTSAYKELFNKYGINYQQGDIRALLCEQSDKAFYSSFMALMSLMLQMRNSITGRTDVDFLISPVKNSDGIFYDSRNYEAQENAILPKNADANGAYNIARKVLWAIGQFKKAEDEKLDKVKIAISNKEWLEYAQTSVKH

SEQ ID NO: 262 - protein, 1367 aa, Synthetic construct
SKLEKFTNCYSLSKTLRFKAIPVGKTQENIDNKRLLVEDEKRAEDYKGVKKLLDRYYLSFINDVLHSIKLKNLNNYISLFRKKTRTEKENKELENLEINLRKEIAKAFKGNEGYKSLFKKDIIETILPEFLDDKDEIALVNSFNGFTTAFTGFFDNRENMFSEEAKSTSIAFRCINENLTRYISNMDIFEKVDAIFDKHEVQEIKEKILNSDYDVEDFFEGEFFNFVLTQEGIDVYNAIIGGFVTESGEKIKGLNEYINLYNQKTKQKLPKFKPLYKQVLSDRESLSFYGEGSSGDEPGVATGNGQPVTGNWLAGASQGDGVPIPSQIADQLRGKEFKSWRDFREQFWMAVSKDPSALENLSPSNRYFVSQGLAPYAVPEEHLGSKEKFEIHHVVPLESGGALYNIDNLVIVTPKRHSEIHKELKLKRKEKGYTSDEEVLEVFRNTLNKNSEIFSSIKKLEKLFKNFDEYSSAGIFVKNGPAISTISKDIFGEWNVIRDKWNAEYDDIHLKKKAVVTEKYEDDRRKSFKKIGSFSLEQLQEYADADLSVVEKLKEIIIQKVDEIYKVYGSSEKLFDADFVLEKSLKKNDAVVAIMKDLLDSVKSFENYIKAFFGEGKETNRDESFYGDFVLAYDILLKVDHIYDAIRNYVTQKPYSKDKFKLYFQNPQFMGGWDKDKETDYRATILRYGSKYYLAIMDKKYAKCLQKIDKDDVNGNYEKINYKLLPGPNKMLPKVFFSKKWMAYYNPSEDIQKIYKNGTFKKGDMFNLNDCHKLIDFFKDSISRYPKWSNAYDFNFSETEKYKDIAGFYREVEEQGYKVSFESASKKEVDKLVEEGKLYMFQIYNKDFSDKSHGTPNLHTMYFKLLFDENNHGQIRLSGGAELFMRRASLKKEELVVHPANSPIANKNPDNPKKTTTLSYDVYKDKRFSEDQYELHIPIAINKCPKNIFKINTEVRVLLKHDDNPYVIGIARGERNLLYIVVVDGKGNIVEQYSLNEIINNFNGIRIKTDYHSLLDKKEKERFEARQNWTSIENIKELKAGYISQVVHKICELVEKYDAVIALEDLNSGFKNSRVKVEKQVYQKFEKMLIDKLNYMVDKKSNPCATGGALKGYQITNKFESFKSMSTQNGFIFYIPAWLTSKIDPSTGFVNLLKTKYTSIADSKKFISSFDRIMYVPEEDLFEFALDYKNFSRTDADYIKKWKLYSYGNRIRIFRNPKKNNVFDWEEVCLTSAYKELFNKYGINYQQGDIRALLCEQSDKAFYSSFMALMSLMLQMRNSITGRTDVDFLISPVKNSDGIFYDSRNYEAQENAILPKNADANGAYNIARKVLWAIGQFKKAEDEKLDKVKIAISNKEWLEYAQTSVKH

SEQ ID NO: 263 - protein, 1299 aa, Synthetic construct
SKLEKFTNCYSLSKTLRFKAIPVGKTQENIDNKRLLVEDEKRAEDYKGVKKLLDRYYLSFINDVLHSIKLKNLNNYISLFRKKTRTEKENKELENLEINLRKEIAKAFKGNEGYKSLFKKDIIETILPEFLDDKDEIALVNSFNGFTTAFTGFFDNRENMFSEEAKSTSIAFRCINENLTRYISNMDIFEKVDAIFDKHEVQEIKEKILNSDYDVEDFFEGEFFNFVLTQEGIDVYNAIIGGFVTESGEKIKGLNEYINLYNQKTKQKLPKFKPLYKQVLSDRESLSFYGEGSSGRLREQALMRDKGLCLHCKNNRKIKVADMVDHIIPIKVDPSLKLKLENLQSLCNPCHNRKTAEDKKKYGGYTSDEEVLEVFRNTLNKNSEIFSSIKKLEKLFKNFDEYSSAGIFVKNGPAISTISKDIFGEWNVIRDKWNAEYDDIHLKKKAVVTEKYEDDRRKSFKKIGSFSLEQLQEYADADLSVVEKLKEIIIQKVDEIYKVYGSSEKLFDADFVLEKSLKKNDAVVAIMKDLLDSVKSFENYIKAFFGEGKETNRDESFYGDFVLAYDILLKVDHIYDAIRNYVTQKPYSKDKFKLYFQNPQFMGGWDKDKETDYRATILRYGSKYYLAIMDKKYAKCLQKIDKDDVNGNYEKINYKLLPGPNKMLPKVFFSKKWMAYYNPSEDIQKIYKNGTFKKGDMFNLNDCHKLIDFFKDSISRYPKWSNAYDFNFSETEKYKDIAGFYREVEEQGYKVSFESASKKEVDKLVEEGKLYMFQIYNKDFSDKSHGTPNLHTMYFKLLFDENNHGQIRLSGGAELFMRRASLKKEELVVHPANSPIANKNPDNPKKTTTLSYDVYKDKRFSEDQYELHIPIAINKCPKNIFKINTEVRVLLKHDDNPYVIGIARGERNLLYIVVVDGKGNIVEQYSLNEIINNFNGIRIKTDYHSLLDKKEKERFEARQNWTSIENIKELKAGYISQVVHKICELVEKYDAVIALEDLNSGFKNSRVKVEKQVYQKFEKMLIDKLNYMVDKKSNPCATGGALKGYQITNKFESFKSMSTQNGFIFYIPAWLTSKIDPSTGFVNLLKTKYTSIADSKKFISSFDRIMYVPEEDLFEFALDYKNFSRTDADYIKKWKLYSYGNRIRIFRNPKKNNVFDWEEVCLTSAYKELFNKYGINYQQGDIRALLCEQSDKAFYSSFMALMSLMLQMRNSITGRTDVDFLISPVKNSDGIFYDSRNYEAQENAILPKNADANGAYNIARKVLWAIGQFKKAEDEKLDKVKIAISNKEWLEYAQTSVKH

SEQ ID NO: 264 - protein, 1328 aa, Synthetic construct
SKLEKFTNCYSLSKTLRFKAIPVGKTQENIDNKRLLVEDEKRAEDYKGVKKLLDRYYLSFINDVLHSIKLKNLNNYISLFRKKTRTEKENKELENLEINLRKEIAKAFKGNEGYKSLFKKDIIETILPEFLDDKDEIALVNSFNGFTTAFTGFFDNRENMFSEEAKSTSIAFRCINENLTRYISNMDIFEKVDAIFDKHEVQEIKEKILNSDYDVEDFFEGEFFNFVLTQEGIDVYNAIIGGFVTESGEKIKGLNEYINLYNQKTKQKLPKFKPLYKQVLSDRESLSFYGEGSSGMNYFIVEVSEQEVKREKEKARELRRSQWWKNRIARGICHYCGEIFPPEELTMDHLVPVVRGGKSTRGNVVPACKECNNRKKYLLPVEWEEYLDSLESGYTSDEEVLEVFRNTLNKNSEIFSSIKKLEKLFKNFDEYSSAGIFVKNGPAISTISKDIFGEWNVIRDKWNAEYDDIHLKKKAVVTEKYEDDRRKSFKKIGSFSLEQLQEYADADLSVVEKLKEIIIQKVDEIYKVYGSSEKLFDADFVLEKSLKKNDAVVAIMKDLLDSVKSFENYIKAFFGEGKETNRDESFYGDFVLAYDILLKVDHIYDAIRNYVTQKPYSKDKFKLYFQNPQFMGGWDKDKETDYRATILRYGSKYYLAIMDKKYAKCLQKIDKDDVNGNYEKINYKLLPGPNKMLPKVFFSKKWMAYYNPSEDIQKIYKNGTFKKGDMFNLNDCHKLIDFFKDSISRYPKWSNAYDFNFSETEKYKDIAGFYREVEEQGYKVSFESASKKEVDKLVEEGKLYMFQIYNKDFSDKSHGTPNLHTMYFKLLFDENNHGQIRLSGGAELFMRRASLKKEELVVHPANSPIANKNPDNPKKTTTLSYDVYKDKRFSEDQYELHIPIAINKCPKNIFKINTEVRVLLKHDDNPYVIGIARGERNLLYIVVVDGKGNIVEQYSLNEIINNFNGIRIKTDYHSLLDKKEKERFEARQNWTSIENIKELKAGYISQVVHKICELVEKYDAVIALEDLNSGFKNSRVKVEKQVYQKFEKMLIDKLNYMVDKKSNPCATGGALKGYQITNKFESFKSMSTQNGFIFYIPAWLTSKIDPSTGFVNLLKTKYTSIADSKKFISSFDRIMYVPEEDLFEFALDYKNFSRTDADYIKKWKLYSYGNRIRIFRNPKKNNVFDWEEVCLTSAYKELFNKYGINYQQGDIRALLCEQSDKAFYSSFMALMSLMLQMRNSITGRTDVDFLISPVKNSDGIFYDSRNYEAQENAILPKNADANGAYNIARKVLWAIGQFKKAEDEKLDKVKIAISNKEWLEYAQTSVKH

SEQ ID NO: 265 - protein, 1441 aa, Synthetic construct
SKLEKFTNCYSLSKTLRFKAIPVGKTQENIDNKRLLVEDEKRAEDYKGVKKLLDRYYLSFINDVLHSIKLKNLNNYISLFRKKTRTEKENKELENLEINLRKEIAKAFKGNEGYKSLFKKDIIETILPEFLDDKDEIALVNSFNGFTTAFTGFFDNRENMFSEEAKSTSIAFRCINENLTRYISNMDIFEKVDAIFDKHEVQEIKEKILNSDYDVEDFFEGEFFNFVLTQEGIDVYNAIIGGFVTESGEKIKGLNEYINLYNQKTKQKLPKFKPLYKQVLSDRESLSFYGEGSSGPPSSFSKAKKEAVKIYLDYPTSFYCGCDITWKNKKKGIPELESCGYQVRKQEKRASRIEWEHVVPAWQFGHQRQCWQKGGRKNCTRNDKQFKSMEADLHNLVPAIGEVNGDRSNFRFSQWNGSKGAFYGQCAFKVDFKGRVAEPPAQSRGAIARTYLYMNNEYKFNLSKAQRQLMEAWNKQYPVSTWECTRDERIAKIQGNHNQFVYKACGYTSDEEVLEVFRNTLNKNSEIFSSIKKLEKLFKNFDEYSSAGIFVKNGPAISTISKDIFGEWNVIRDKWNAEYDDIHLKKKAVVTEKYEDDRRKSFKKIGSFSLEQLQEYADADLSVVEKLKEIIIQKVDEIYKVYGSSEKLFDADFVLEKSLKKNDAVVAIMKDLLDSVKSFENYIKAFFGEGKETNRDESFYGDFVLAYDILLKVDHIYDAIRNYVTQKPYSKDKFKLYFQNPQFMGGWDKDKETDYRATILRYGSKYYLAIMDKKYAKCLQKIDKDDVNGNYEKINYKLLPGPNKMLPKVFFSKKWMAYYNPSEDIQKIYKNGTFKKGDMFNLNDCHKLIDFFKDSISRYPKWSNAYDFNFSETEKYKDIAGFYREVEEQGYKVSFESASKKEVDKLVEEGKLYMFQIYNKDFSDKSHGTPNLHTMYFKLLFDENNHGQIRLSGGAELFMRRASLKKEELVVHPANSPIANKNPDNPKKTTTLSYDVYKDKRFSEDQYELHIPIAINKCPKNIFKINTEVRVLLKHDDNPYVIGIARGERNLLYIVVVDGKGNIVEQYSLNEIINNFNGIRIKTDYHSLLDKKEKERFEARQNWTSIENIKELKAGYISQVVHKICELVEKYDAVIALEDLNSGFKNSRVKVEKQVYQKFEKMLIDKLNYMVDKKSNPCATGGALKGYQITNKFESFKSMSTQNGFIFYIPAWLTSKIDPSTGFVNLLKTKYTSIADSKKFISSFDRIMYVPEEDLFEFALDYKNFSRTDADYIKKWKLYSYGNRIRIFRNPKKNNVFDWEEVCLTSAYKELFNKYGINYQQGDIRALLCEQSDKAFYSSFMALMSLMLQMRNSITGRTDVDFLISPVKNSDGIFYDSRNYEAQENAILPKNADANGAYNIARKVLWAIGQFKKAEDEKLDKVKIAISNKEWLEYAQTSVKH

SEQ ID NO: 266 - protein, 1506 aa, Synthetic construct
SKLEKFTNCYSLSKTLRFKAIPVGKTQENIDNKRLLVEDEKRAEDYKGVKKLLDRYYLSFINDVLHSIKLKNLNNYISLFRKKTRTEKENKELENLEINLRKEIAKAFKGNEGYKSLFKKDIIETILPEFLDDKDEIALVNSFNGFTTAFTGFFDNRENMFSEEAKSTSIAFRCINENLTRYISNMDIFEKVDAIFDKHEVQEIKEKILNSDYDVEDFFEGEFFNFVLTQEGIDVYNAIIGGFVTESGEKIKGLNEYINLYNQKTKQKLPKFKPLYKQVLSDRESLSFYGEGSSGWRRRREDARAAPGLLGRLPVLPVAAAAELPPVPGGPRGPGELAKYGLPGLAQLKSRESYVLCYDPRTRGALWVVEQLRPERLRGDGDRRECDFREDDSVHAYHRATNADYRGSGFDRGHLAAAANHRWSQKAMDDTFYLSNVAPQVPHLNQNAWNNLEKYSRSLTRSYQNVYVCTGPLFLPRTEADGKSYVKYQVIGKNHVAVPTHFFKVLILEAAGGQIELRTYVMPNAPVDEAIPLERFLVPIESIERASGLLFVPNILARAGSLKAITAGSKGYTSDEEVLEVFRNTLNKNSEIFSSIKKLEKLFKNFDEYSSAGIFVKNGPAISTISKDIFGEWNVIRDKWNAEYDDIHLKKKAVVTEKYEDDRRKSFKKIGSFSLEQLQEYADADLSVVEKLKEIIIQKVDEIYKVYGSSEKLFDADFVLEKSLKKNDAVVAIMKDLLDSVKSFENYIKAFFGEGKETNRDESFYGDFVLAYDILLKVDHIYDAIRNYVTQKPYSKDKFKLYFQNPQFMGGWDKDKETDYRATILRYGSKYYLAIMDKKYAKCLQKIDKDDVNGNYEKINYKLLPGPNKMLPKVFFSKKWMAYYNPSEDIQKIYKNGTFKKGDMFNLNDCHKLIDFFKDSISRYPKWSNAYDFNFSETEKYKDIAGFYREVEEQGYKVSFESASKKEVDKLVEEGKLYMFQIYNKDFSDKSHGTPNLHTMYFKLLFDENNHGQIRLSGGAELFMRRASLKKEELVVHPANSPIANKNPDNPKKTTTLSYDVYKDKRFSEDQYELHIPIAINKCPKNIFKINTEVRVLLKHDDNPYVIGIARGERNLLYIVVVDGKGNIVEQYSLNEIINNFNGIRIKTDYHSLLDKKEKERFEARQNWTSIENIKELKAGYISQVVHKICELVEKYDAVIALEDLNSGFKNSRVKVEKQVYQKFEKMLIDKLNYMVDKKSNPCATGGALKGYQITNKFESFKSMSTQNGFIFYIPAWLTSKIDPSTGFVNLLKTKYTSIADSKKFISSFDRIMYVPEEDLFEFALDYKNFSRTDADYIKKWKLYSYGNRIRIFRNPKKNNVFDWEEVCLTSAYKELFNKYGINYQQGDIRALLCEQSDKAFYSSFMALMSLMLQMRNSITGRTDVDFLISPVKNSDGIFYDSRNYEAQENAILPKNADANGAYNIARKVLWAIGQFKKAEDEKLDKVKIAISNKEWLEYAQTSVKH

SEQ ID NO: 267 - protein, 1508 aa, Synthetic construct
SKLEKFTNCYSLSKTLRFKAIPVGKTQENIDNKRLLVEDEKRAEDYKGVKKLLDRYYLSFINDVLHSIKLKNLNNYISLFRKKTRTEKENKELENLEINLRKEIAKAFKGNEGYKSLFKKDIIETILPEFLDDKDEIALVNSFNGFTTAFTGFFDNRENMFSEEAKSTSIAFRCINENLTRYISNMDIFEKVDAIFDKHEVQEIKEKILNSDYDVEDFFEGEFFNFVLTQEGIDVYNAIIGGFVTESGEKIKGLNEYINLYNQKTKQKLPKFKPLYKQVLSDRESLSFYGEGSSGWSKEGHVMTCRIAQGLLNDEAAHAVKMLLPEYVNGDLSALCVWPDQVRHWYKYKWTSPLHFIDTPDKACNFDYERDCHDQHGVKDMCVAGAIQNFTTQLSHYREGTSDRRYNMTEALLFLSHFMGDIHQPMHVGFTSDAGGNSIDLRWFRHKSNLHHVWDREIILTAAKDYYAKDINLLEEDIEGNFTDGIWSDDLASWRECGNVFSCVNKFATESINIACKWGYKGVEAGETLSDDYFNSRLPIVMKRVAQGGIRLAMLLNNVFGASQQEDSVVATGYTSDEEVLEVFRNTLNKNSEIFSSIKKLEKLFKNFDEYSSAGIFVKNGPAISTISKDIFGEWNVIRDKWNAEYDDIHLKKKAVVTEKYEDDRRKSFKKIGSFSLEQLQEYADADLSVVEKLKEIIIQKVDEIYKVYGSSEKLFDADFVLEKSLKKNDAVVAIMKDLLDSVKSFENYIKAFFGEGKETNRDESFYGDFVLAYDILLKVDHIYDAIRNYVTQKPYSKDKFKLYFQNPQFMGGWDKDKETDYRATILRYGSKYYLAIMDKKYAKCLQKIDKDDVNGNYEKINYKLLPGPNKMLPKVFFSKKWMAYYNPSEDIQKIYKNGTFKKGDMFNLNDCHKLIDFFKDSISRYPKWSNAYDFNFSETEKYKDIAGFYREVEEQGYKVSFESASKKEVDKLVEEGKLYMFQIYNKDFSDKSHGTPNLHTMYFKLLFDENNHGQIRLSGGAELFMRRASLKKEELVVHPANSPIANKNPDNPKKTTTLSYDVYKDKRFSEDQYELHIPIAINKCPKNIFKINTEVRVLLKHDDNPYVIGIARGERNLLYIVVVDGKGNIVEQYSLNEIINNFNGIRIKTDYHSLLDKKEKERFEARQNWTSIENIKELKAGYISQVVHKICELVEKYDAVIALEDLNSGFKNSRVKVEKQVYQKFEKMLIDKLNYMVDKKSNPCATGGALKGYQITNKFESFKSMSTQNGFIFYIPAWLTSKIDPSTGFVNLLKTKYTSIADSKKFISSFDRIMYVPEEDLFEFALDYKNFSRTDADYIKKWKLYSYGNRIRIFRNPKKNNVFDWEEVCLTSAYKELFNKYGINYQQGDIRALLCEQSDKAFYSSFMALMSLMLQMRNSITGRTDVDFLISPVKNSDGIFYDSRNYEAQENAILPKNADANGAYNIARKVLWAIGQFKKAEDEKLDKVKIAISNKEWLEYAQTSVKH

SEQ ID NO: 268 - protein, 1318 aa, Synthetic construct
SKLEKFTNCYSLSKTLRFKAIPVGKTQENIDNKRLLVEDEKRAEDYKGVKKLLDRYYLSFINDVLHSIKLKNLNNYISLFRKKTRTEKENKELENLEINLRKEIAKAFKGNEGYKSLFKKDIIETILPEFLDDKDEIALVNSFNGFTTAFTGFFDNRENMFSEEAKSTSIAFRCINENLTRYISNMDIFEKVDAIFDKHEVQEIKEKILNSDYDVEDFFEGEFFNFVLTQEGIDVYNAIIGGFVTESGEKIKGLNEYINLYNQKTKQKLPKFKPLYKQVLSDRESLSFYGEGSSGMKSKISEYTEKEFLEFVKDIYTNNKKKFPTEESHIQAVLEFKKLTEHPSGSDLLYYPNENREDSPAGVVKEVKEWRASKGLPGFKAGGYTSDEEVLEVFRNTLNKNSEIFSSIKKLEKLFKNFDEYSSAGIFVKNGPAISTISKDIFGEWNVIRDKWNAEYDDIHLKKKAVVTEKYEDDRRKSFKKIGSFSLEQLQEYADADLSVVEKLKEIIIQKVDEIYKVYGSSEKLFDADFVLEKSLKKNDAVVAIMKDLLDSVKSFENYIKAFFGEGKETNRDESFYGDFVLAYDILLKVDHIYDAIRNYVTQKPYSKDKFKLYFQNPQFMGGWDKDKETDYRATILRYGSKYYLAIMDKKYAKCLQKIDKDDVNGNYEKINYKLLPGPNKMLPKVFFSKKWMAYYNPSEDIQKIYKNGTFKKGDMFNLNDCHKLIDFFKDSISRYPKWSNAYDFNFSETEKYKDIAGFYREVEEQGYKVSFESASKKEVDKLVEEGKLYMFQIYNKDFSDKSHGTPNLHTMYFKLLFDENNHGQIRLSGGAELFMRRASLKKEELVVHPANSPIANKNPDNPKKTTTLSYDVYKDKRFSEDQYELHIPIAINKCPKNIFKINTEVRVLLKHDDNPYVIGIARGERNLLYIVVVDGKGNIVEQYSLNEIINNFNGIRIKTDYHSLLDKKEKERFEARQNWTSIENIKELKAGYISQVVHKICELVEKYDAVIALEDLNSGFKNSRVKVEKQVYQKFEKMLIDKLNYMVDKKSNPCATGGALKGYQITNKFESFKSMSTQNGFIFYIPAWLTSKIDPSTGFVNLLKTKYTSIADSKKFISSFDRIMYVPEEDLFEFALDYKNFSRTDADYIKKWKLYSYGNRIRIFRNPKKNNVFDWEEVCLTSAYKELFNKYGINYQQGDIRALLCEQSDKAFYSSFMALMSLMLQMRNSITGRTDVDFLISPVKNSDGIFYDSRNYEAQENAILPKNADANGAYNIARKVLWAIGQFKKAEDEKLDKVKIAISNKEWLEYAQTSVKH

SEQ ID NO: 269 - protein, 1318 aa, Synthetic construct
SKLEKFTNCYSLSKTLRFKAIPVGKTQENIDNKRLLVEDEKRAEDYKGVKKLLDRYYLSFINDVLHSIKLKNLNNYISLFRKKTRTEKENKELENLEINLRKEIAKAFKGNEGYKSLFKKDIIETILPEFLDDKDEIALVNSFNGFTTAFTGFFDNRENMFSEEAKSTSIAFRCINENLTRYISNMDIFEKVDAIFDKHEVQEIKEKILNSDYDVEDFFEGEFFNFVLTQEGIDVYNAIIGGFVTESGEKIKGLNEYINLYNQKTKQKLPKFKPLYKQVLSDRESLSFYGEGSSGMELKNSISDYTEAEFVQLLKEIEKENVAATDDVLDVLLEHFVKITEHPDGTDLIYYPSDNRDDSPEGIVKEIKEWRAANGKPGFKQGGYTSDEEVLEVFRNTLNKNSEIFSSIKKLEKLFKNFDEYSSAGIFVKNGPAISTISKDIFGEWNVIRDKWNAEYDDIHLKKKAVVTEKYEDDRRKSFKKIGSFSLEQLQEYADADLSVVEKLKEIIIQKVDEIYKVYGSSEKLFDADFVLEKSLKKNDAVVAIMKDLLDSVKSFENYIKAFFGEGKETNRDESFYGDFVLAYDILLKVDHIYDAIRNYVTQKPYSKDKFKLYFQNPQFMGGWDKDKETDYRATILRYGSKYYLAIMDKKYAKCLQKIDKDDVNGNYEKINYKLLPGPNKMLPKVFFSKKWMAYYNPSEDIQKIYKNGTFKKGDMFNLNDCHKLIDFFKDSISRYPKWSNAYDFNFSETEKYKDIAGFYREVEEQGYKVSFESASKKEVDKLVEEGKLYMFQIYNKDFSDKSHGTPNLHTMYFKLLFDENNHGQIRLSGGAELFMRRASLKKEELVVHPANSPIANKNPDNPKKTTTLSYDVYKDKRFSEDQYELHIPIAINKCPKNIFKINTEVRVLLKHDDNPYVIGIARGERNLLYIVVVDGKGNIVEQYSLNEIINNFNGIRIKTDYHSLLDKKEKERFEARQNWTSIENIKELKAGYISQVVHKICELVEKYDAVIALEDLNSGFKNSRVKVEKQVYQKFEKMLIDKLNYMVDKKSNPCATGGALKGYQITNKFESFKSMSTQNGFIFYIPAWLTSKIDPSTGFVNLLKTKYTSIADSKKFISSFDRIMYVPEEDLFEFALDYKNFSRTDADYIKKWKLYSYGNRIRIFRNPKKNNVFDWEEVCLTSAYKELFNKYGINYQQGDIRALLCEQSDKAFYSSFMALMSLMLQMRNSITGRTDVDFLISPVKNSDGIFYDSRNYEAQENAILPKNADANGAYNIARKVLWAIGQFKKAEDEKLDKVKIAISNKEWLEYAQTSVKH

SEQ ID NO: 270 - protein, 1341 aa, Synthetic construct
SKLEKFTNCYSLSKTLRFKAIPVGKTQENIDNKRLLVEDEKRAEDYKGVKKLLDRYYLSFINDVLHSIKLKNLNNYISLFRKKTRTEKENKELENLEINLRKEIAKAFKGNEGYKSLFKKDIIETILPEFLDDKDEIALVNSFNGFTTAFTGFFDNRENMFSEEAKSTSIAFRCINENLTRYISNMDIFEKVDAIFDKHEVQEIKEKILNSDYDVEDFFEGEFFNFVLTQEGIDVYNAIIGGFVTESGEKIKGLNEYINLYNQKTKQKLPKFKPLYKQVLSDRESLSFYGEGSSGGRTPTAEERRIANALGALPCIACYMHGVISNEVSLHHIAGRTAPGCHKKQLPLCRWHHQHAAPAEVREKYPWLVPVHADGVVGGKKEFTLLNKSEMELLADAYEMANIMHGYTSDEEVLEVFRNTLNKNSEIFSSIKKLEKLFKNFDEYSSAGIFVKNGPAISTISKDIFGEWNVIRDKWNAEYDDIHLKKKAVVTEKYEDDRRKSFKKIGSFSLEQLQEYADADLSVVEKLKEIIIQKVDEIYKVYGSSEKLFDADFVLEKSLKKNDAVVAIMKDLLDSVKSFENYIKAFFGEGKETNRDESFYGDFVLAYDILLKVDHIYDAIRNYVTQKPYSKDKFKLYFQNPQFMGGWDKDKETDYRATILRYGSKYYLAIMDKKYAKCLQKIDKDDVNGNYEKINYKLLPGPNKMLPKVFFSKKWMAYYNPSEDIQKIYKNGTFKKGDMFNLNDCHKLIDFFKDSISRYPKWSNAYDFNFSETEKYKDIAGFYREVEEQGYKVSFESASKKEVDKLVEEGKLYMFQIYNKDFSDKSHGTPNLHTMYFKLLFDENNHGQIRLSGGAELFMRRASLKKEELVVHPANSPIANKNPDNPKKTTTLSYDVYKDKRFSEDQYELHIPIAINKCPKNIFKINTEVRVLLKHDDNPYVIGIARGERNLLYIVVVDGKGNIVEQYSLNEIINNFNGIRIKTDYHSLLDKKEKERFEARQNWTSIENIKELKAGYISQVVHKICELVEKYDAVIALEDLNSGFKNSRVKVEKQVYQKFEKMLIDKLNYMVDKKSNPCATGGALKGYQITNKFESFKSMSTQNGFIFYIPAWLTSKIDPSTGFVNLLKTKYTSIADSKKFISSFDRIMYVPEEDLFEFALDYKNFSRTDADYIKKWKLYSYGNRIRIFRNPKKNNVFDWEEVCLTSAYKELFNKYGINYQQGDIRALLCEQSDKAFYSSFMALMSLMLQMRNSITGRTDVDFLISPVKNSDGIFYDSRNYEAQENAILPKNADANGAYNIARKVLWAIGQFKKAEDEKLDKVKIAISNKEWLEYAQTSVKH

SEQ ID NO: 271 - protein, 1336 aa, Synthetic construct
SKLEKFTNCYSLSKTLRFKAIPVGKTQENIDNKRLLVEDEKRAEDYKGVKKLLDRYYLSFINDVLHSIKLKNLNNYISLFRKKTRTEKENKELENLEINLRKEIAKAFKGNEGYKSLFKKDIIETILPEFLDDKDEIALVNSFNGFTTAFTGFFDNRENMFSEEAKSTSIAFRCINENLTRYISNMDIFEKVDAIFDKHEVQEIKEKILNSDYDVEDFFEGEFFNFVLTQEGIDVYNAIIGGFVTESGEKIKGLNEYINLYNQKTKQKLPKFKPLYKQVLSDRESLSFYGEGSSGMEWKDIKGYEGHYQVSNTGEVYSIKSGKTLKHQIPKDGYHRIGLFKGGKGKTFQVHRLVAIHFCEGYEEGLVVDHKDGNKDNNLSTNLRWVTQKINVENQMSRGTGYTSDEEVLEVFRNTLNKNSEIFSSIKKLEKLFKNFDEYSSAGIFVKNGPAISTISKDIFGEWNVIRDKWNAEYDDIHLKKKAVVTEKYEDDRRKSFKKIGSFSLEQLQEYADADLSVVEKLKEIIIQKVDEIYKVYGSSEKLFDADFVLEKSLKKNDAVVAIMKDLLDSVKSFENYIKAFFGEGKETNRDESFYGDFVLAYDILLKVDHIYDAIRNYVTQKPYSKDKFKLYFQNPQFMGGWDKDKETDYRATILRYGSKYYLAIMDKKYAKCLQKIDKDDVNGNYEKINYKLLPGPNKMLPKVFFSKKWMAYYNPSEDIQKIYKNGTFKKGDMFNLNDCHKLIDFFKDSISRYPKWSNAYDFNFSETEKYKDIAGFYREVEEQGYKVSFESASKKEVDKLVEEGKLYMFQIYNKDFSDKSHGTPNLHTMYFKLLFDENNHGQIRLSGGAELFMRRASLKKEELVVHPANSPIANKNPDNPKKTTTLSYDVYKDKRFSEDQYELHIPIAINKCPKNIFKINTEVRVLLKHDDNPYVIGIARGERNLLYIVVVDGKGNIVEQYSLNEIINNFNGIRIKTDYHSLLDKKEKERFEARQNWTSIENIKELKAGYISQVVHKICELVEKYDAVIALEDLNSGFKNSRVKVEKQVYQKFEKMLIDKLNYMVDKKSNPCATGGALKGYQITNKFESFKSMSTQNGFIFYIPAWLTSKIDPSTGFVNLLKTKYTSIADSKKFISSFDRIMYVPEEDLFEFALDYKNFSRTDADYIKKWKLYSYGNRIRIFRNPKKNNVFDWEEVCLTSAYKELFNKYGINYQQGDIRALLCEQSDKAFYSSFMALMSLMLQMRNSITGRTDVDFLISPVKNSDGIFYDSRNYEAQENAILPKNADANGAYNIARKVLWAIGQFKKAEDEKLDKVKIAISNKEWLEYAQTSVKH

SEQ ID NO: 272 - protein, 1501 aa, Synthetic construct
SKLEKFTNCYSLSKTLRFKAIPVGKTQENIDNKRLLVEDEKRAEDYKGVKKLLDRYYLSFINDVLHSIKLKNLNNYISLFRKKTRTEKENKELENLEINLRKEIAKAFKGNEGYKSLFKKDIIETILPEFLDDKDEIALVNSFNGFTTAFTGFFDNRENMFSEEAKSTSIAFRCINENLTRYISNMDIFEKVDAIFDKHEVQEIKEKILNSDYDVEDFFEGEFFNFVLTQEGIDVYNAIIGGFVTESGEKIKGLNEYINLYNQKTKQKLPKFKPLYKQVLSDRESLSFYGEGSSGWGALGHATVAYVAQHYVSPEAASWAQGILGSSSSSYLASIASWADEYRLTSAGKWSASLHFIDAEDNPPTNCNVDYERDCGSSGCSISAIANYTQRVSDSSLSSENHAEALRFLVHFIGDMTQPLHDEAYAVGGNKINVTFDGYHDNLHSDWDTYMPQKLIGGHALSDAESWAKTLVQNIESGNYTAQAIGWIKGDNISEPITTATRWASDANALVCTVVMPHGAAALQTGDLYPTYYDSVIDTIELQIAKGGYRLANWINEIHGSEIAKGYTSDEEVLEVFRNTLNKNSEIFSSIKKLEKLFKNFDEYSSAGIFVKNGPAISTISKDIFGEWNVIRDKWNAEYDDIHLKKKAVVTEKYEDDRRKSFKKIGSFSLEQLQEYADADLSVVEKLKEIIIQKVDEIYKVYGSSEKLFDADFVLEKSLKKNDAVVAIMKDLLDSVKSFENYIKAFFGEGKETNRDESFYGDFVLAYDILLKVDHIYDAIRNYVTQKPYSKDKFKLYFQNPQFMGGWDKDKETDYRATILRYGSKYYLAIMDKKYAKCLQKIDKDDVNGNYEKINYKLLPGPNKMLPKVFFSKKWMAYYNPSEDIQKIYKNGTFKKGDMFNLNDCHKLIDFFKDSISRYPKWSNAYDFNFSETEKYKDIAGFYREVEEQGYKVSFESASKKEVDKLVEEGKLYMFQIYNKDFSDKSHGTPNLHTMYFKLLFDENNHGQIRLSGGAELFMRRASLKKEELVVHPANSPIANKNPDNPKKTTTLSYDVYKDKRFSEDQYELHIPIAINKCPKNIFKINTEVRVLLKHDDNPYVIGIARGERNLLYIVVVDGKGNIVEQYSLNEIINNFNGIRIKTDYHSLLDKKEKERFEARQNWTSIENIKELKAGYISQVVHKICELVEKYDAVIALEDLNSGFKNSRVKVEKQVYQKFEKMLIDKLNYMVDKKSNPCATGGALKGYQITNKFESFKSMSTQNGFIFYIPAWLTSKIDPSTGFVNLLKTKYTSIADSKKFISSFDRIMYVPEEDLFEFALDYKNFSRTDADYIKKWKLYSYGNRIRIFRNPKKNNVFDWEEVCLTSAYKELFNKYGINYQQGDIRALLCEQSDKAFYSSFMALMSLMLQMRNSITGRTDVDFLISPVKNSDGIFYDSRNYEAQENAILPKNADANGAYNIARKVLWAIGQFKKAEDEKLDKVKIAISNKEWLEYAQTSVKH

SEQ ID NO: 273 - protein, 1498 aa, Synthetic construct
SKLEKFTNCYSLSKTLRFKAIPVGKTQENIDNKRLLVEDEKRAEDYKGVKKLLDRYYLSFINDVLHSIKLKNLNNYISLFRKKTRTEKENKELENLEINLRKEIAKAFKGNEGYKSLFKKDIIETILPEFLDDKDEIALVNSFNGFTTAFTGFFDNRENMFSEEAKSTSIAFRCINENLTRYISNMDIFEKVDAIFDKHEVQEIKEKILNSDYDVEDFFEGEFFNFVLTQEGIDVYNAIIGGFVTESGEKIKGLNEYINLYNQKTKQKLPKFKPLYKQVLSDRESLSFYGEGSSGWGNLGHETVAYIAQSFVASSTESFCQNILGDDSTSYLANVATWADTYKYTDAGEFSKPYHFIDAQDNPPQSCGVDYDRDCGSAGCSISAIQNYTNILLESPNGSEALNALKFVVHIIGDIHQPLHDENLEAGGNGIDVTYDGETTNLHHIWDTNMPEEAAGGYSLSVAKTYADLLTERIKTGTYSSKKDSWTDGIDIKDPVSTSMIWAADANTYVCSTVLDDGLAYINSTDLSGEYYDKSQPVFEELIAKAGYRLAAWLDLIASQPSGYTSDEEVLEVFRNTLNKNSEIFSSIKKLEKLFKNFDEYSSAGIFVKNGPAISTISKDIFGEWNVIRDKWNAEYDDIHLKKKAVVTEKYEDDRRKSFKKIGSFSLEQLQEYADADLSVVEKLKEIIIQKVDEIYKVYGSSEKLFDADFVLEKSLKKNDAVVAIMKDLLDSVKSFENYIKAFFGEGKETNRDESFYGDFVLAYDILLKVDHIYDAIRNYVTQKPYSKDKFKLYFQNPQFMGGWDKDKETDYRATILRYGSKYYLAIMDKKYAKCLQKIDKDDVNGNYEKINYKLLPGPNKMLPKVFFSKKWMAYYNPSEDIQKIYKNGTFKKGDMFNLNDCHKLIDFFKDSISRYPKWSNAYDFNFSETEKYKDIAGFYREVEEQGYKVSFESASKKEVDKLVEEGKLYMFQIYNKDFSDKSHGTPNLHTMYFKLLFDENNHGQIRLSGGAELFMRRASLKKEELVVHPANSPIANKNPDNPKKTTTLSYDVYKDKRFSEDQYELHIPIAINKCPKNIFKINTEVRVLLKHDDNPYVIGIARGERNLLYIVVVDGKGNIVEQYSLNEIINNFNGIRIKTDYHSLLDKKEKERFEARQNWTSIENIKELKAGYISQVVHKICELVEKYDAVIALEDLNSGFKNSRVKVEKQVYQKFEKMLIDKLNYMVDKKSNPCATGGALKGYQITNKFESFKSMSTQNGFIFYIPAWLTSKIDPSTGFVNLLKTKYTSIADSKKFISSFDRIMYVPEEDLFEFALDYKNFSRTDADYIKKWKLYSYGNRIRIFRNPKKNNVFDWEEVCLTSAYKELFNKYGINYQQGDIRALLCEQSDKAFYSSFMALMSLMLQMRNSITGRTDVDFLISPVKNSDGIFYDSRNYEAQENAILPKNADANGAYNIARKVLWAIGQFKKAEDEKLDKVKIAISNKEWLEYAQTSVKH

SEQ ID NO: 274 - protein, 1317 aa, Synthetic construct
SKLEKFTNCYSLSKTLRFKAIPVGKTQENIDNKRLLVEDEKRAEDYKGVKKLLDRYYLSFINDVLHSIKLKNLNNYISLFRKKTRTEKENKELENLEINLRKEIAKAFKGNEGYKSLFKKDIIETILPEFLDDKDEIALVNSFNGFTTAFTGFFDNRENMFSEEAKSTSIAFRCINENLTRYISNMDIFEKVDAIFDKHEVQEIKEKILNSDYDVEDFFEGEFFNFVLTQEGIDVYNAIIGGFVTESGEKIKGLNEYINLYNQKTKQKLPKFKPLYKQVLSDRESLSFYGEGSSGMELKHSISDYTEAEFLQLVTTICNADTSSEEELVKLVTHFEEMTEHPSGSDLIYYPKEGDDDSPSGIVNTVKQWRAANGKSGFKQGGYTSDEEVLEVFRNTLNKNSEIFSSIKKLEKLFKNFDEYSSAGIFVKNGPAISTISKDIFGEWNVIRDKWNAEYDDIHLKKKAVVTEKYEDDRRKSFKKIGSFSLEQLQEYADADLSVVEKLKEIIIQKVDEIYKVYGSSEKLFDADFVLEKSLKKNDAVVAIMKDLLDSVKSFENYIKAFFGEGKETNRDESFYGDFVLAYDILLKVDHIYDAIRNYVTQKPYSKDKFKLYFQNPQFMGGWDKDKETDYRATILRYGSKYYLAIMDKKYAKCLQKIDKDDVNGNYEKINYKLLPGPNKMLPKVFFSKKWMAYYNPSEDIQKIYKNGTFKKGDMFNLNDCHKLIDFFKDSISRYPKWSNAYDFNFSETEKYKDIAGFYREVEEQGYKVSFESASKKEVDKLVEEGKLYMFQIYNKDFSDKSHGTPNLHTMYFKLLFDENNHGQIRLSGGAELFMRRASLKKEELVVHPANSPIANKNPDNPKKTTTLSYDVYKDKRFSEDQYELHIPIAINKCPKNIFKINTEVRVLLKHDDNPYVIGIARGERNLLYIVVVDGKGNIVEQYSLNEIINNFNGIRIKTDYHSLLDKKEKERFEARQNWTSIENIKELKAGYISQVVHKICELVEKYDAVIALEDLNSGFKNSRVKVEKQVYQKFEKMLIDKLNYMVDKKSNPCATGGALKGYQITNKFESFKSMSTQNGFIFYIPAWLTSKIDPSTGFVNLLKTKYTSIADSKKFISSFDRIMYVPEEDLFEFALDYKNFSRTDADYIKKWKLYSYGNRIRIFRNPKKNNVFDWEEVCLTSAYKELFNKYGINYQQGDIRALLCEQSDKAFYSSFMALMSLMLQMRNSITGRTDVDFLISPVKNSDGIFYDSRNYEAQENAILPKNADANGAYNIARKVLWAIGQFKKAEDEKLDKVKIAISNKEWLEYAQTSVKH

SEQ ID NO: 275 - protein, 1328 aa, Synthetic construct
SKLEKFTNCYSLSKTLRFKAIPVGKTQENIDNKRLLVEDEKRAEDYKGVKKLLDRYYLSFINDVLHSIKLKNLNNYISLFRKKTRTEKENKELENLEINLRKEIAKAFKGNEGYKSLFKKDIIETILPEFLDDKDEIALVNSFNGFTTAFTGFFDNRENMFSEEAKSTSIAFRCINENLTRYISNMDIFEKVDAIFDKHEVQEIKEKILNSDYDVEDFFEGEFFNFVLTQEGIDVYNAIIGGFVTESGEKIKGLNEYINLYNQKTKQKLPKFKPLYKQVLSDRESLSFYGEGSSGMLLTGKLYKEEKQKFYDAQNGKCLICQRELNPDVQANHLDHDHELNGPKAGKVRGLLCNLCNAAEGQMKHKFNRSGLKGQGVDYLEWLENLLTYLKSGYTSDEEVLEVFRNTLNKNSEIFSSIKKLEKLFKNFDEYSSAGIFVKNGPAISTISKDIFGEWNVIRDKWNAEYDDIHLKKKAVVTEKYEDDRRKSFKKIGSFSLEQLQEYADADLSVVEKLKEIIIQKVDEIYKVYGSSEKLFDADFVLEKSLKKNDAVVAIMKDLLDSVKSFENYIKAFFGEGKETNRDESFYGDFVLAYDILLKVDHIYDAIRNYVTQKPYSKDKFKLYFQNPQFMGGWDKDKETDYRATILRYGSKYYLAIMDKKYAKCLQKIDKDDVNGNYEKINYKLLPGPNKMLPKVFFSKKWMAYYNPSEDIQKIYKNGTFKKGDMFNLNDCHKLIDFFKDSISRYPKWSNAYDFNFSETEKYKDIAGFYREVEEQGYKVSFESASKKEVDKLVEEGKLYMFQIYNKDFSDKSHGTPNLHTMYFKLLFDENNHGQIRLSGGAELFMRRASLKKEELVVHPANSPIANKNPDNPKKTTTLSYDVYKDKRFSEDQYELHIPIAINKCPKNIFKINTEVRVLLKHDDNPYVIGIARGERNLLYIVVVDGKGNIVEQYSLNEIINNFNGIRIKTDYHSLLDKKEKERFEARQNWTSIENIKELKAGYISQVVHKICELVEKYDAVIALEDLNSGFKNSRVKVEKQVYQKFEKMLIDKLNYMVDKKSNPCATGGALKGYQITNKFESFKSMSTQNGFIFYIPAWLTSKIDPSTGFVNLLKTKYTSIADSKKFISSFDRIMYVPEEDLFEFALDYKNFSRTDADYIKKWKLYSYGNRIRIFRNPKKNNVFDWEEVCLTSAYKELFNKYGINYQQGDIRALLCEQSDKAFYSSFMALMSLMLQMRNSITGRTDVDFLISPVKNSDGIFYDSRNYEAQENAILPKNADANGAYNIARKVLWAIGQFKKAEDEKLDKVKIAISNKEWLEYAQTSVKH

SEQ ID NO: 276 - protein, 1438 aa, Synthetic construct
SKLEKFTNCYSLSKTLRFKAIPVGKTQENIDNKRLLVEDEKRAEDYKGVKKLLDRYYLSFINDVLHSIKLKNLNNYISLFRKKTRTEKENKELENLEINLRKEIAKAFKGNEGYKSLFKKDIIETILPEFLDDKDEIALVNSFNGFTTAFTGFFDNRENMFSEEAKSTSIAFRCINENLTRYISNMDIFEKVDAIFDKHEVQEIKEKILNSDYDVEDFFEGEFFNFVLTQEGIDVYNAIIGGFVTESGEKIKGLNEYINLYNQKTKQKLPKFKPLYKQVLSDRESLSFYGEGSSGSFSHAKNEAVKIYRDHPVSFYCGCEIRWQGKKGIPDLESCGYQVRKNENRASRIEWEHVVPAWQFGHQLQCWQQGGRKNCTRTSPEFNQMEADLHNLTPAIGEVNGDRSNFSFSQWNGVDGVTYGQCEMQVNFKERTAMPPERARGAIARTYLYMSEQYGLRLSKAQSQLMQAWNNQYPVSEWECVRDQRIEKVQGNSNRFVREQCPGYTSDEEVLEVFRNTLNKNSEIFSSIKKLEKLFKNFDEYSSAGIFVKNGPAISTISKDIFGEWNVIRDKWNAEYDDIHLKKKAVVTEKYEDDRRKSFKKIGSFSLEQLQEYADADLSVVEKLKEIIIQKVDEIYKVYGSSEKLFDADFVLEKSLKKNDAVVAIMKDLLDSVKSFENYIKAFFGEGKETNRDESFYGDFVLAYDILLKVDHIYDAIRNYVTQKPYSKDKFKLYFQNPQFMGGWDKDKETDYRATILRYGSKYYLAIMDKKYAKCLQKIDKDDVNGNYEKINYKLLPGPNKMLPKVFFSKKWMAYYNPSEDIQKIYKNGTFKKGDMFNLNDCHKLIDFFKDSISRYPKWSNAYDFNFSETEKYKDIAGFYREVEEQGYKVSFESASKKEVDKLVEEGKLYMFQIYNKDFSDKSHGTPNLHTMYFKLLFDENNHGQIRLSGGAELFMRRASLKKEELVVHPANSPIANKNPDNPKKTTTLSYDVYKDKRFSEDQYELHIPIAINKCPKNIFKINTEVRVLLKHDDNPYVIGIARGERNLLYIVVVDGKGNIVEQYSLNEIINNFNGIRIKTDYHSLLDKKEKERFEARQNWTSIENIKELKAGYISQVVHKICELVEKYDAVIALEDLNSGFKNSRVKVEKQVYQKFEKMLIDKLNYMVDKKSNPCATGGALKGYQITNKFESFKSMSTQNGFIFYIPAWLTSKIDPSTGFVNLLKTKYTSIADSKKFISSFDRIMYVPEEDLFEFALDYKNFSRTDADYIKKWKLYSYGNRIRIFRNPKKNNVFDWEEVCLTSAYKELFNKYGINYQQGDIRALLCEQSDKAFYSSFMALMSLMLQMRNSITGRTDVDFLISPVKNSDGIFYDSRNYEAQENAILPKNADANGAYNIARKVLWAIGQFKKAEDEKLDKVKIAISNKEWLEYAQTSVKH

SEQ ID NO: 277 - protein, 1480 aa, Synthetic construct
SKLEKFTNCYSLSKTLRFKAIPVGKTQENIDNKRLLVEDEKRAEDYKGVKKLLDRYYLSFINDVLHSIKLKNLNNYISLFRKKTRTEKENKELENLEINLRKEIAKAFKGNEGYKSLFKKDIIETILPEFLDDKDEIALVNSFNGFTTAFTGFFDNRENMFSEEAKSTSIAFRCINENLTRYISNMDIFEKVDAIFDKHEVQEIKEKILNSDYDVEDFFEGEFFNFVLTQEGIDVYNAIIGGFVTESGEKIKGLNEYINLYNQKTKQKLPKFKPLYKQVLSDRESLSFYGEGSSGADLPALPGGPAGGTGELAKYGLPGVAQLRSRESYVLSYDPRTRGALWVLEQLRPERLRGDGDRSACDFREDDSVHAYHRATNADYRGSGFDRGHLAAAANHRWSQRAMDDTFYLSNVAPQVPHLNQNAWNNLERYSRSLTRTYQNVYVCTGPLFLPRTEADGKSYVKYQVIGKNHVAVPTHFFKVLILEAAGGQIELRSYVMPNAPVDETIPLERFLVPIESIERASGLLFVPNILARAGNLKAITAGSGYTSDEEVLEVFRNTLNKNSEIFSSIKKLEKLFKNFDEYSSAGIFVKNGPAISTISKDIFGEWNVIRDKWNAEYDDIHLKKKAVVTEKYEDDRRKSFKKIGSFSLEQLQEYADADLSVVEKLKEIIIQKVDEIYKVYGSSEKLFDADFVLEKSLKKNDAVVAIMKDLLDSVKSFENYIKAFFGEGKETNRDESFYGDFVLAYDILLKVDHIYDAIRNYVTQKPYSKDKFKLYFQNPQFMGGWDKDKETDYRATILRYGSKYYLAIMDKKYAKCLQKIDKDDVNGNYEKINYKLLPGPNKMLPKVFFSKKWMAYYNPSEDIQKIYKNGTFKKGDMFNLNDCHKLIDFFKDSISRYPKWSNAYDFNFSETEKYKDIAGFYREVEEQGYKVSFESASKKEVDKLVEEGKLYMFQIYNKDFSDKSHGTPNLHTMYFKLLFDENNHGQIRLSGGAELFMRRASLKKEELVVHPANSPIANKNPDNPKKTTTLSYDVYKDKRFSEDQYELHIPIAINKCPKNIFKINTEVRVLLKHDDNPYVIGIARGERNLLYIVVVDGKGNIVEQYSLNEIINNFNGIRIKTDYHSLLDKKEKERFEARQNWTSIENIKELKAGYISQVVHKICELVEKYDAVIALEDLNSGFKNSRVKVEKQVYQKFEKMLIDKLNYMVDKKSNPCATGGALKGYQITNKFESFKSMSTQNGFIFYIPAWLTSKIDPSTGFVNLLKTKYTSIADSKKFISSFDRIMYVPEEDLFEFALDYKNFSRTDADYIKKWKLYSYGNRIRIFRNPKKNNVFDWEEVCLTSAYKELFNKYGINYQQGDIRALLCEQSDKAFYSSFMALMSLMLQMRNSITGRTDVDFLISPVKNSDGIFYDSRNYEAQENAILPKNADANGAYNIARKVLWAIGQFKKAEDEKLDKVKIAISNKEWLEYAQTSVKH

SEQ ID NO: 278 - protein, 1382 aa, Synthetic construct
SKLEKFTNCYSLSKTLRFKAIPVGKTQENIDNKRLLVEDEKRAEDYKGVKKLLDRYYLSFINDVLHSIKLKNLNNYISLFRKKTRTEKENKELENLEINLRKEIAKAFKGNEGYKSLFKKDIIETILPEFLDDKDEIALVNSFNGFTTAFTGFFDNRENMFSEEAKSTSIAFRCINENLTRYISNMDIFEKVDAIFDKHEVQEIKEKILNSDYDVEDFFEGEFFNFVLTQEGIDVYNAIIGGFVTESGEKIKGLNEYINLYNQKTKQKLPKFKPLYKQVLSDRESLSFYGEGSSGEKNSKDAQKMINEMQKRNRQTNERIEEIIRTTGKENAKYLIEKIKLHDMQEGKCLYSLEAIPLEDLLNNPFNYEVDHIIPRSVSFDNSFNNKVLVKQEENSKKGNRTPFQYLSSSDSKISYETFKKHILNLAKGKGRISKTKKEYLLEERDGYTSDEEVLEVFRNTLNKNSEIFSSIKKLEKLFKNFDEYSSAGIFVKNGPAISTISKDIFGEWNVIRDKWNAEYDDIHLKKKAVVTEKYEDDRRKSFKKIGSFSLEQLQEYADADLSVVEKLKEIIIQKVDEIYKVYGSSEKLFDADFVLEKSLKKNDAVVAIMKDLLDSVKSFENYIKAFFGEGKETNRDESFYGDFVLAYDILLKVDHIYDAIRNYVTQKPYSKDKFKLYFQNPQFMGGWDKDKETDYRATILRYGSKYYLAIMDKKYAKCLQKIDKDDVNGNYEKINYKLLPGPNKMLPKVFFSKKWMAYYNPSEDIQKIYKNGTFKKGDMFNLNDCHKLIDFFKDSISRYPKWSNAYDFNFSETEKYKDIAGFYREVEEQGYKVSFESASKKEVDKLVEEGKLYMFQIYNKDFSDKSHGTPNLHTMYFKLLFDENNHGQIRLSGGAELFMRRASLKKEELVVHPANSPIANKNPDNPKKTTTLSYDVYKDKRFSEDQYELHIPIAINKCPKNIFKINTEVRVLLKHDDNPYVIGIARGERNLLYIVVVDGKGNIVEQYSLNEIINNFNGIRIKTDYHSLLDKKEKERFEARQNWTSIENIKELKAGYISQVVHKICELVEKYDAVIALEDLNSGFKNSRVKVEKQVYQKFEKMLIDKLNYMVDKKSNPCATGGALKGYQITNKFESFKSMSTQNGFIFYIPAWLTSKIDPSTGFVNLLKTKYTSIADSKKFISSFDRIMYVPEEDLFEFALDYKNFSRTDADYIKKWKLYSYGNRIRIFRNPKKNNVFDWEEVCLTSAYKELFNKYGINYQQGDIRALLCEQSDKAFYSSFMALMSLMLQMRNSITGRTDVDFLISPVKNSDGIFYDSRNYEAQENAILPKNADANGAYNIARKVLWAIGQFKKAEDEKLDKVKIAISNKEWLEYAQTSVKH

SEQ ID NO: 279 - protein, 1335 aa, Synthetic construct
SKLEKFTNCYSLSKTLRFKAIPVGKTQENIDNKRLLVEDEKRAEDYKGVKKLLDRYYLSFINDVLHSIKLKNLNNYISLFRKKTRTEKENKELENLEINLRKEIAKAFKGNEGYKSLFKKDIIETILPEFLDDKDEIALVNSFNGFTTAFTGFFDNRENMFSEEAKSTSIAFRCINENLTRYISNMDIFEKVDAIFDKHEVQEIKEKILNSDYDVEDFFEGEFFNFVLTQEGIDVYNAIIGGFVTESGEKIKGLNEYINLYNQKTKQKLPKFKPLYKQVLSDRESLSFYGEGSSGDGNAHTVNPSKLVSHRLGDGLTVQQIDRACTPALWCALTREKDFDEKNGLPAREDRAIRVHGHEIKSSDYIQVFSKRKKTDSDRDETPFGAIAVRGGFVEIGPSGYTSDEEVLEVFRNTLNKNSEIFSSIKKLEKLFKNFDEYSSAGIFVKNGPAISTISKDIFGEWNVIRDKWNAEYDDIHLKKKAVVTEKYEDDRRKSFKKIGSFSLEQLQEYADADLSVVEKLKEIIIQKVDEIYKVYGSSEKLFDADFVLEKSLKKNDAVVAIMKDLLDSVKSFENYIKAFFGEGKETNRDESFYGDFVLAYDILLKVDHIYDAIRNYVTQKPYSKDKFKLYFQNPQFMGGWDKDKETDYRATILRYGSKYYLAIMDKKYAKCLQKIDKDDVNGNYEKINYKLLPGPNKMLPKVFFSKKWMAYYNPSEDIQKIYKNGTFKKGDMFNLNDCHKLIDFFKDSISRYPKWSNAYDFNFSETEKYKDIAGFYREVEEQGYKVSFESASKKEVDKLVEEGKLYMFQIYNKDFSDKSHGTPNLHTMYFKLLFDENNHGQIRLSGGAELFMRRASLKKEELVVHPANSPIANKNPDNPKKTTTLSYDVYKDKRFSEDQYELHIPIAINKCPKNIFKINTEVRVLLKHDDNPYVIGIARGERNLLYIVVVDGKGNIVEQYSLNEIINNFNGIRIKTDYHSLLDKKEKERFEARQNWTSIENIKELKAGYISQVVHKICELVEKYDAVIALEDLNSGFKNSRVKVEKQVYQKFEKMLIDKLNYMVDKKSNPCATGGALKGYQITNKFESFKSMSTQNGFIFYIPAWLTSKIDPSTGFVNLLKTKYTSIADSKKFISSFDRIMYVPEEDLFEFALDYKNFSRTDADYIKKWKLYSYGNRIRIFRNPKKNNVFDWEEVCLTSAYKELFNKYGINYQQGDIRALLCEQSDKAFYSSFMALMSLMLQMRNSITGRTDVDFLISPVKNSDGIFYDSRNYEAQENAILPKNADANGAYNIARKVLWAIGQFKKAEDEKLDKVKIAISNKEWLEYAQTSVKH

SEQ ID NO: 280 - protein, 1381 aa, Synthetic construct
SKLEKFTNCYSLSKTLRFKAIPVGKTQENIDNKRLLVEDEKRAEDYKGVKKLLDRYYLSFINDVLHSIKLKNLNNYISLFRKKTRTEKENKELENLEINLRKEIAKAFKGNEGYKSLFKKDIIETILPEFLDDKDEIALVNSFNGFTTAFTGFFDNRENMFSEEAKSTSIAFRCINENLTRYISNMDIFEKVDAIFDKHEVQEIKEKILNSDYDVEDFFEGEFFNFVLTQEGIDVYNAIIGGFVTESGEKIKGLNEYINLYNQKTKQKLPKFKPLYKQVLSDRESLSFYGEGSSGENQYTNQGKSNSQQRLKRLEKSLKELGSKILKENIPAKLSKIDNNALQNDRLYLYYLQNGKDMYTGDDLDIDRLSNYDIDHIIPQAFLKDNSIDNKVLVSSASNRGKSDDFPSLEVVKKRKTFWYQLLKSKLISQRKFDNLTKAERGGLLGYTSDEEVLEVFRNTLNKNSEIFSSIKKLEKLFKNFDEYSSAGIFVKNGPAISTISKDIFGEWNVIRDKWNAEYDDIHLKKKAVVTEKYEDDRRKSFKKIGSFSLEQLQEYADADLSVVEKLKEIIIQKVDEIYKVYGSSEKLFDADFVLEKSLKKNDAVVAIMKDLLDSVKSFENYIKAFFGEGKETNRDESFYGDFVLAYDILLKVDHIYDAIRNYVTQKPYSKDKFKLYFQNPQFMGGWDKDKETDYRATILRYGSKYYLAIMDKKYAKCLQKIDKDDVNGNYEKINYKLLPGPNKMLPKVFFSKKWMAYYNPSEDIQKIYKNGTFKKGDMFNLNDCHKLIDFFKDSISRYPKWSNAYDFNFSETEKYKDIAGFYREVEEQGYKVSFESASKKEVDKLVEEGKLYMFQIYNKDFSDKSHGTPNLHTMYFKLLFDENNHGQIRLSGGAELFMRRASLKKEELVVHPANSPIANKNPDNPKKTTTLSYDVYKDKRFSEDQYELHIPIAINKCPKNIFKINTEVRVLLKHDDNPYVIGIARGERNLLYIVVVDGKGNIVEQYSLNEIINNFNGIRIKTDYHSLLDKKEKERFEARQNWTSIENIKELKAGYISQVVHKICELVEKYDAVIALEDLNSGFKNSRVKVEKQVYQKFEKMLIDKLNYMVDKKSNPCATGGALKGYQITNKFESFKSMSTQNGFIFYIPAWLTSKIDPSTGFVNLLKTKYTSIADSKKFISSFDRIMYVPEEDLFEFALDYKNFSRTDADYIKKWKLYSYGNRIRIFRNPKKNNVFDWEEVCLTSAYKELFNKYGINYQQGDIRALLCEQSDKAFYSSFMALMSLMLQMRNSITGRTDVDFLISPVKNSDGIFYDSRNYEAQENAILPKNADANGAYNIARKVLWAIGQFKKAEDEKLDKVKIAISNKEWLEYAQTSVKH

SEQ ID NO: 281 - protein, 1347 aa, Synthetic construct
SKLEKFTNCYSLSKTLRFKAIPVGKTQENIDNKRLLVEDEKRAEDYKGVKKLLDRYYLSFINDVLHSIKLKNLNNYISLFRKKTRTEKENKELENLEINLRKEIAKAFKGNEGYKSLFKKDIIETILPEFLDDKDEIALVNSFNGFTTAFTGFFDNRENMFSEEAKSTSIAFRCINENLTRYISNMDIFEKVDAIFDKHEVQEIKEKILNSDYDVEDFFEGEFFNFVLTQEGIDVYNAIIGGFVTESGEKIKGLNEYINLYNQKTKQKLPKFKPLYKQVLSDRESLSFYGEGSSGFPNFVGEPKSKDILKLRLYEQQHGKCLYSGKEINLGRLNEKGYVEIDHALPFSRTWDDSFNNKVLVLGSENQNKGNQTPYEYFNGKDNSREWQEFKARVETSRFPRSKKQRILLQKGYTSDEEVLEVFRNTLNKNSEIFSSIKKLEKLFKNFDEYSSAGIFVKNGPAISTISKDIFGEWNVIRDKWNAEYDDIHLKKKAVVTEKYEDDRRKSFKKIGSFSLEQLQEYADADLSVVEKLKEIIIQKVDEIYKVYGSSEKLFDADFVLEKSLKKNDAVVAIMKDLLDSVKSFENYIKAFFGEGKETNRDESFYGDFVLAYDILLKVDHIYDAIRNYVTQKPYSKDKFKLYFQNPQFMGGWDKDKETDYRATILRYGSKYYLAIMDKKYAKCLQKIDKDDVNGNYEKINYKLLPGPNKMLPKVFFSKKWMAYYNPSEDIQKIYKNGTFKKGDMFNLNDCHKLIDFFKDSISRYPKWSNAYDFNFSETEKYKDIAGFYREVEEQGYKVSFESASKKEVDKLVEEGKLYMFQIYNKDFSDKSHGTPNLHTMYFKLLFDENNHGQIRLSGGAELFMRRASLKKEELVVHPANSPIANKNPDNPKKTTTLSYDVYKDKRFSEDQYELHIPIAINKCPKNIFKINTEVRVLLKHDDNPYVIGIARGERNLLYIVVVDGKGNIVEQYSLNEIINNFNGIRIKTDYHSLLDKKEKERFEARQNWTSIENIKELKAGYISQVVHKICELVEKYDAVIALEDLNSGFKNSRVKVEKQVYQKFEKMLIDKLNYMVDKKSNPCATGGALKGYQITNKFESFKSMSTQNGFIFYIPAWLTSKIDPSTGFVNLLKTKYTSIADSKKFISSFDRIMYVPEEDLFEFALDYKNFSRTDADYIKKWKLYSYGNRIRIFRNPKKNNVFDWEEVCLTSAYKELFNKYGINYQQGDIRALLCEQSDKAFYSSFMALMSLMLQMRNSITGRTDVDFLISPVKNSDGIFYDSRNYEAQENAILPKNADANGAYNIARKVLWAIGQFKKAEDEKLDKVKIAISNKEWLEYAQTSVKH

SEQ ID NO: 282 - protein, 1390 aa, Synthetic construct
SKLEKFTNCYSLSKTLRFKAIPVGKTQENIDNKRLLVEDEKRAEDYKGVKKLLDRYYLSFINDVLHSIKLKNLNNYISLFRKKTRTEKENKELENLEINLRKEIAKAFKGNEGYKSLFKKDIIETILPEFLDDKDEIALVNSFNGFTTAFTGFFDNRENMFSEEAKSTSIAFRCINENLTRYISNMDIFEKVDAIFDKHEVQEIKEKILNSDYDVEDFFEGEFFNFVLTQEGIDVYNAIIGGFVTESGEKIKGLNEYINLYNQKTKQKLPKFKPLYKQVLSDRESLSFYGEGSSGSPENIFKDKNNRIKEFAKGISAYSGANLTDGDFDGAKEELDHIIPRSHKKYGTLNDEANLICVTRGDNKNKGNRIFCLRDLADNYKLKQFETTDDLEIEKKIADTIWDANKKDFKFGNYRSFINLTPQEQKAFRHALFLADENPIKQAVIRAINNRNRTGYTSDEEVLEVFRNTLNKNSEIFSSIKKLEKLFKNFDEYSSAGIFVKNGPAISTISKDIFGEWNVIRDKWNAEYDDIHLKKKAVVTEKYEDDRRKSFKKIGSFSLEQLQEYADADLSVVEKLKEIIIQKVDEIYKVYGSSEKLFDADFVLEKSLKKNDAVVAIMKDLLDSVKSFENYIKAFFGEGKETNRDESFYGDFVLAYDILLKVDHIYDAIRNYVTQKPYSKDKFKLYFQNPQFMGGWDKDKETDYRATILRYGSKYYLAIMDKKYAKCLQKIDKDDVNGNYEKINYKLLPGPNKMLPKVFFSKKWMAYYNPSEDIQKIYKNGTFKKGDMFNLNDCHKLIDFFKDSISRYPKWSNAYDFNFSETEKYKDIAGFYREVEEQGYKVSFESASKKEVDKLVEEGKLYMFQIYNKDFSDKSHGTPNLHTMYFKLLFDENNHGQIRLSGGAELFMRRASLKKEELVVHPANSPIANKNPDNPKKTTTLSYDVYKDKRFSEDQYELHIPIAINKCPKNIFKINTEVRVLLKHDDNPYVIGIARGERNLLYIVVVDGKGNIVEQYSLNEIINNFNGIRIKTDYHSLLDKKEKERFEARQNWTSIENIKELKAGYISQVVHKICELVEKYDAVIALEDLNSGFKNSRVKVEKQVYQKFEKMLIDKLNYMVDKKSNPCATGGALKGYQITNKFESFKSMSTQNGFIFYIPAWLTSKIDPSTGFVNLLKTKYTSIADSKKFISSFDRIMYVPEEDLFEFALDYKNFSRTDADYIKKWKLYSYGNRIRIFRNPKKNNVFDWEEVCLTSAYKELFNKYGINYQQGDIRALLCEQSDKAFYSSFMALMSLMLQMRNSITGRTDVDFLISPVKNSDGIFYDSRNYEAQENAILPKNADANGAYNIARKVLWAIGQFKKAEDEKLDKVKIAISNKEWLEYAQTSVKH

SEQ ID NO: 283 - protein, 1337 aa, Synthetic construct
SKLEKFTNCYSLSKTLRFKAIPVGKTQENIDNKRLLVEDEKRAEDYKGVKKLLDRYYLSFINDVLHSIKLKNLNNYISLFRKKTRTEKENKELENLEINLRKEIAKAFKGNEGYKSLFKKDIIETILPEFLDDKDEIALVNSFNGFTTAFTGFFDNRENMFSEEAKSTSIAFRCINENLTRYISNMDIFEKVDAIFDKHEVQEIKEKILNSDYDVEDFFEGEFFNFVLTQEGIDVYNAIIGGFVTESGEKIKGLNEYINLYNQKTKQKLPKFKPLYKQVLSDRESLSFYGEGSSGHKHRCQVCGIVIEVDVGPYSQGAHIRPLGRKHGGPDVESNMLCLCPNDHVRFDNGALYITDDLKVVNALNGEVIGPLRVHPRHVIDLDHIRYHRSQLPNIPLEGSSGYTSDEEVLEVFRNTLNKNSEIFSSIKKLEKLFKNFDEYSSAGIFVKNGPAISTISKDIFGEWNVIRDKWNAEYDDIHLKKKAVVTEKYEDDRRKSFKKIGSFSLEQLQEYADADLSVVEKLKEIIIQKVDEIYKVYGSSEKLFDADFVLEKSLKKNDAVVAIMKDLLDSVKSFENYIKAFFGEGKETNRDESFYGDFVLAYDILLKVDHIYDAIRNYVTQKPYSKDKFKLYFQNPQFMGGWDKDKETDYRATILRYGSKYYLAIMDKKYAKCLQKIDKDDVNGNYEKINYKLLPGPNKMLPKVFFSKKWMAYYNPSEDIQKIYKNGTFKKGDMFNLNDCHKLIDFFKDSISRYPKWSNAYDFNFSETEKYKDIAGFYREVEEQGYKVSFESASKKEVDKLVEEGKLYMFQIYNKDFSDKSHGTPNLHTMYFKLLFDENNHGQIRLSGGAELFMRRASLKKEELVVHPANSPIANKNPDNPKKTTTLSYDVYKDKRFSEDQYELHIPIAINKCPKNIFKINTEVRVLLKHDDNPYVIGIARGERNLLYIVVVDGKGNIVEQYSLNEIINNFNGIRIKTDYHSLLDKKEKERFEARQNWTSIENIKELKAGYISQVVHKICELVEKYDAVIALEDLNSGFKNSRVKVEKQVYQKFEKMLIDKLNYMVDKKSNPCATGGALKGYQITNKFESFKSMSTQNGFIFYIPAWLTSKIDPSTGFVNLLKTKYTSIADSKKFISSFDRIMYVPEEDLFEFALDYKNFSRTDADYIKKWKLYSYGNRIRIFRNPKKNNVFDWEEVCLTSAYKELFNKYGINYQQGDIRALLCEQSDKAFYSSFMALMSLMLQMRNSITGRTDVDFLISPVKNSDGIFYDSRNYEAQENAILPKNADANGAYNIARKVLWAIGQFKKAEDEKLDKVKIAISNKEWLEYAQTSVKH

SEQ ID NO: 284 - protein, 1393 aa, Synthetic construct
SKLEKFTNCYSLSKTLRFKAIPVGKTQENIDNKRLLVEDEKRAEDYKGVKKLLDRYYLSFINDVLHSIKLKNLNNYISLFRKKTRTEKENKELENLEINLRKEIAKAFKGNEGYKSLFKKDIIETILPEFLDDKDEIALVNSFNGFTTAFTGFFDNRENMFSEEAKSTSIAFRCINENLTRYISNMDIFEKVDAIFDKHEVQEIKEKILNSDYDVEDFFEGEFFNFVLTQEGIDVYNAIIGGFVTESGEKIKGLNEYINLYNQKTKQKLPKFKPLYKQVLSDRESLSFYGEGSSGSEAEEVIFGFADTTEITTTADAIECQISNDASIDETEKHQLVKSRRGQGIFRSRLEQVESRCRVTGVQLKNHLIASHIKPWAVSNNQERLDGHNGLLLAPHVDHLFDKGFISFEDNGEMIVSEKLNLDVLKAWSISQGNYGYFSKQQQEYMCYHRENVFKKLGYTSDEEVLEVFRNTLNKNSEIFSSIKKLEKLFKNFDEYSSAGIFVKNGPAISTISKDIFGEWNVIRDKWNAEYDDIHLKKKAVVTEKYEDDRRKSFKKIGSFSLEQLQEYADADLSVVEKLKEIIIQKVDEIYKVYGSSEKLFDADFVLEKSLKKNDAVVAIMKDLLDSVKSFENYIKAFFGEGKETNRDESFYGDFVLAYDILLKVDHIYDAIRNYVTQKPYSKDKFKLYFQNPQFMGGWDKDKETDYRATILRYGSKYYLAIMDKKYAKCLQKIDKDDVNGNYEKINYKLLPGPNKMLPKVFFSKKWMAYYNPSEDIQKIYKNGTFKKGDMFNLNDCHKLIDFFKDSISRYPKWSNAYDFNFSETEKYKDIAGFYREVEEQGYKVSFESASKKEVDKLVEEGKLYMFQIYNKDFSDKSHGTPNLHTMYFKLLFDENNHGQIRLSGGAELFMRRASLKKEELVVHPANSPIANKNPDNPKKTTTLSYDVYKDKRFSEDQYELHIPIAINKCPKNIFKINTEVRVLLKHDDNPYVIGIARGERNLLYIVVVDGKGNIVEQYSLNEIINNFNGIRIKTDYHSLLDKKEKERFEARQNWTSIENIKELKAGYISQVVHKICELVEKYDAVIALEDLNSGFKNSRVKVEKQVYQKFEKMLIDKLNYMVDKKSNPCATGGALKGYQITNKFESFKSMSTQNGFIFYIPAWLTSKIDPSTGFVNLLKTKYTSIADSKKFISSFDRIMYVPEEDLFEFALDYKNFSRTDADYIKKWKLYSYGNRIRIFRNPKKNNVFDWEEVCLTSAYKELFNKYGINYQQGDIRALLCEQSDKAFYSSFMALMSLMLQMRNSITGRTDVDFLISPVKNSDGIFYDSRNYEAQENAILPKNADANGAYNIARKVLWAIGQFKKAEDEKLDKVKIAISNKEWLEYAQTSVKH

SEQ ID NO: 285 - protein, 1356 aa, Synthetic construct
SKLEKFTNCYSLSKTLRFKAIPVGKTQENIDNKRLLVEDEKRAEDYKGVKKLLDRYYLSFINDVLHSIKLKNLNNYISLFRKKTRTEKENKELENLEINLRKEIAKAFKGNEGYKSLFKKDIIETILPEFLDDKDEIALVNSFNGFTTAFTGFFDNRENMFSEEAKSTSIAFRCINENLTRYISNMDIFEKVDAIFDKHEVQEIKEKILNSDYDVEDFFEGEFFNFVLTQEGIDVYNAIIGGFVTESGEKIKGLNEYINLYNQKTKQKLPKFKPLYKQVLSDRESLSFYGEGSSGDEPGVATGNGQPVTGNWLAGASQGDGVPIPSQIADQLRGKEFKSWRDFREQFWVAVANDPELVKYFRKTNAKGMRDGLSPFTPKAEQAGGRDKYEIHHVVQISQGGAVYDIDNLRVMTPKMHIQVGYTSDEEVLEVFRNTLNKNSEIFSSIKKLEKLFKNFDEYSSAGIFVKNGPAISTISKDIFGEWNVIRDKWNAEYDDIHLKKKAVVTEKYEDDRRKSFKKIGSFSLEQLQEYADADLSVVEKLKEIIIQKVDEIYKVYGSSEKLFDADFVLEKSLKKNDAVVAIMKDLLDSVKSFENYIKAFFGEGKETNRDESFYGDFVLAYDILLKVDHIYDAIRNYVTQKPYSKDKFKLYFQNPQFMGGWDKDKETDYRATILRYGSKYYLAIMDKKYAKCLQKIDKDDVNGNYEKINYKLLPGPNKMLPKVFFSKKWMAYYNPSEDIQKIYKNGTFKKGDMFNLNDCHKLIDFFKDSISRYPKWSNAYDFNFSETEKYKDIAGFYREVEEQGYKVSFESASKKEVDKLVEEGKLYMFQIYNKDFSDKSHGTPNLHTMYFKLLFDENNHGQIRLSGGAELFMRRASLKKEELVVHPANSPIANKNPDNPKKTTTLSYDVYKDKRFSEDQYELHIPIAINKCPKNIFKINTEVRVLLKHDDNPYVIGIARGERNLLYIVVVDGKGNIVEQYSLNEIINNFNGIRIKTDYHSLLDKKEKERFEARQNWTSIENIKELKAGYISQVVHKICELVEKYDAVIALEDLNSGFKNSRVKVEKQVYQKFEKMLIDKLNYMVDKKSNPCATGGALKGYQITNKFESFKSMSTQNGFIFYIPAWLTSKIDPSTGFVNLLKTKYTSIADSKKFISSFDRIMYVPEEDLFEFALDYKNFSRTDADYIKKWKLYSYGNRIRIFRNPKKNNVFDWEEVCLTSAYKELFNKYGINYQQGDIRALLCEQSDKAFYSSFMALMSLMLQMRNSITGRTDVDFLISPVKNSDGIFYDSRNYEAQENAILPKNADANGAYNIARKVLWAIGQFKKAEDEKLDKVKIAISNKEWLEYAQTSVKH

SEQ ID NO: 286 - protein, 1395 aa, Synthetic construct
MSKLEKFTNCYSLSKTLRFKAIPVGKTQENIDNKRLLVEDEKRAEDYKGVKKLLDRYYLSFINDVLHSIKLKNLNNYISLFRKKTRTEKENKELENLEINLRKEIAKAFKGNEGYKSLFKKDIIETILPEFLDDKDEIALVNSFNGFTTAFTGFFDNRENMFSEEAKSTSIAFRCINENLTRYISNMDIFEKVDAIFDKHEVQEIKEKILNSDYDVEDFFEGEFFNFVLTQEGIDVYNAIIGGFVTESGGSSGSPENIFKDKNNRIKEFAKGISAYSGANLTDGDFDGAKEELDHIIPRSHKKYGTLNDEANLICVTRGDNKNKGNRIFCLRDLADNYKLKQFETTDDLEIEKKIADTIWDANKKDFKFGNYRSFINLTPQEQKAFRHALFLADENPIKQAVIRAINNRNRTGSSGEKIKGLNEYINLYNQKTKQKLPKFKPLYKQVLSDRESLSFYGEGYTSDEEVLEVFRNTLNKNSEIFSSIKKLEKLFKNFDEYSSAGIFVKNGPAISTISKDIFGEWNVIRDKWNAEYDDIHLKKKAVVTEKYEDDRRKSFKKIGSFSLEQLQEYADADLSVVEKLKEIIIQKVDEIYKVYGSSEKLFDADFVLEKSLKKNDAVVAIMKDLLDSVKSFENYIKAFFGEGKETNRDESFYGDFVLAYDILLKVDHIYDAIRNYVTQKPYSKDKFKLYFQNPQFMGGWDKDKETDYRATILRYGSKYYLAIMDKKYAKCLQKIDKDDVNGNYEKINYKLLPGPNKMLPKVFFSKKWMAYYNPSEDIQKIYKNGTFKKGDMFNLNDCHKLIDFFKDSISRYPKWSNAYDFNFSETEKYKDIAGFYREVEEQGYKVSFESASKKEVDKLVEEGKLYMFQIYNKDFSDKSHGTPNLHTMYFKLLFDENNHGQIRLSGGAELFMRRASLKKEELVVHPANSPIANKNPDNPKKTTTLSYDVYKDKRFSEDQYELHIPIAINKCPKNIFKINTEVRVLLKHDDNPYVIGIARGERNLLYIVVVDGKGNIVEQYSLNEIINNFNGIRIKTDYHSLLDKKEKERFEARQNWTSIENIKELKAGYISQVVHKICELVEKYDAVIALEDLNSGFKNSRVKVEKQVYQKFEKMLIDKLNYMVDKKSNPCATGGALKGYQITNKFESFKSMSTQNGFIFYIPAWLTSKIDPSTGFVNLLKTKYTSIADSKKFISSFDRIMYVPEEDLFEFALDYKNFSRTDADYIKKWKLYSYGNRIRIFRNPKKNNVFDWEEVCLTSAYKELFNKYGINYQQGDIRALLCEQSDKAFYSSFMALMSLMLQMRNSITGRTDVDFLISPVKNSDGIFYDSRNYEAQENAILPKNADANGAYNIARKVLWAIGQFKKAEDEKLDKVKIAISNKEWLEYAQTSVKH

SEQ ID NO: 287 - protein, 1361 aa, Synthetic construct
MSKLEKFTNCYSLSKTLRFKAIPVGKTQENIDNKRLLVEDEKRAEDYKGVKKLLDRYYLSFINDVLHSIKLKNLNNYISLFRKKTRTEKENKELENLEINLRKEIAKAFKGNEGYKSLFKKDIIETILPEFLDDKDEIALVNSFNGFTTAFTGFFDNRENMFSEEAKSTSIAFRCINENLTRYISNMDIFEKVDAIFDKHEVQEIKEKILNSDYDVEDFFEGEFFNFVLTQEGIDVYNAIIGGFVTESGGSSGDEPGVATGNGQPVTGNWLAGASQGDGVPIPSQIADQLRGKEFKSWRDFREQFWVAVANDPELVKYFRKTNAKGMRDGLSPFTPKAEQAGGRDKYEIHHVVQISQGGAVYDIDNLRVMTPKMHIQVGSSGEKIKGLNEYINLYNQKTKQKLPKFKPLYKQVLSDRESLSFYGEGYTSDEEVLEVFRNTLNKNSEIFSSIKKLEKLFKNFDEYSSAGIFVKNGPAISTISKDIFGEWNVIRDKWNAEYDDIHLKKKAVVTEKYEDDRRKSFKKIGSFSLEQLQEYADADLSVVEKLKEIIIQKVDEIYKVYGSSEKLFDADFVLEKSLKKNDAVVAIMKDLLDSVKSFENYIKAFFGEGKETNRDESFYGDFVLAYDILLKVDHIYDAIRNYVTQKPYSKDKFKLYFQNPQFMGGWDKDKETDYRATILRYGSKYYLAIMDKKYAKCLQKIDKDDVNGNYEKINYKLLPGPNKMLPKVFFSKKWMAYYNPSEDIQKIYKNGTFKKGDMFNLNDCHKLIDFFKDSISRYPKWSNAYDFNFSETEKYKDIAGFYREVEEQGYKVSFESASKKEVDKLVEEGKLYMFQIYNKDFSDKSHGTPNLHTMYFKLLFDENNHGQIRLSGGAELFMRRASLKKEELVVHPANSPIANKNPDNPKKTTTLSYDVYKDKRFSEDQYELHIPIAINKCPKNIFKINTEVRVLLKHDDNPYVIGIARGERNLLYIVVVDGKGNIVEQYSLNEIINNFNGIRIKTDYHSLLDKKEKERFEARQNWTSIENIKELKAGYISQVVHKICELVEKYDAVIALEDLNSGFKNSRVKVEKQVYQKFEKMLIDKLNYMVDKKSNPCATGGALKGYQITNKFESFKSMSTQNGFIFYIPAWLTSKIDPSTGFVNLLKTKYTSIADSKKFISSFDRIMYVPEEDLFEFALDYKNFSRTDADYIKKWKLYSYGNRIRIFRNPKKNNVFDWEEVCLTSAYKELFNKYGINYQQGDIRALLCEQSDKAFYSSFMALMSLMLQMRNSITGRTDVDFLISPVKNSDGIFYDSRNYEAQENAILPKNADANGAYNIARKVLWAIGQFKKAEDEKLDKVKIAISNKEWLEYAQTSVKH

SEQ ID NO: 288 - protein, 1342 aa, Synthetic construct
MSKLEKFTNCYSLSKTLRFKAIPVGKTQENIDNKRLLVEDEKRAEDYKGVKKLLDRYYLSFINDVLHSIKLKNLNNYISLFRKKTRTEKENKELENLEINLRKEIAKAFKGNEGYKSLFKKDIIETILPEFLDDKDEIALVNSFNGFTTAFTGFFDNRENMFSEEAKSTSIAFRCINENLTRYISNMDIFEKVDAIFDKHEVQEIKEKILNSDYDVEDFFEGEFFNFVLTQEGIDVYNAIIGGFVTESGGSSGHKHRCQVCGIVIEVDVGPYSQGAHIRPLGRKHGGPDVESNMLCLCPNDHVRFDNGALYITDDLKVVNALNGEVIGPLRVHPRHVIDLDHIRYHRSQLPNIPLEGSSGSSGEKIKGLNEYINLYNQKTKQKLPKFKPLYKQVLSDRESLSFYGEGYTSDEEVLEVFRNTLNKNSEIFSSIKKLEKLFKNFDEYSSAGIFVKNGPAISTISKDIFGEWNVIRDKWNAEYDDIHLKKKAVVTEKYEDDRRKSFKKIGSFSLEQLQEYADADLSVVEKLKEIIIQKVDEIYKVYGSSEKLFDADFVLEKSLKKNDAVVAIMKDLLDSVKSFENYIKAFFGEGKETNRDESFYGDFVLAYDILLKVDHIYDAIRNYVTQKPYSKDKFKLYFQNPQFMGGWDKDKETDYRATILRYGSKYYLAIMDKKYAKCLQKIDKDDVNGNYEKINYKLLPGPNKMLPKVFFSKKWMAYYNPSEDIQKIYKNGTFKKGDMFNLNDCHKLIDFFKDSISRYPKWSNAYDFNFSETEKYKDIAGFYREVEEQGYKVSFESASKKEVDKLVEEGKLYMFQIYNKDFSDKSHGTPNLHTMYFKLLFDENNHGQIRLSGGAELFMRRASLKKEELVVHPANSPIANKNPDNPKKTTTLSYDVYKDKRFSEDQYELHIPIAINKCPKNIFKINTEVRVLLKHDDNPYVIGIARGERNLLYIVVVDGKGNIVEQYSLNEIINNFNGIRIKTDYHSLLDKKEKERFEARQNWTSIENIKELKAGYISQVVHKICELVEKYDAVIALEDLNSGFKNSRVKVEKQVYQKFEKMLIDKLNYMVDKKSNPCATGGALKGYQITNKFESFKSMSTQNGFIFYIPAWLTSKIDPSTGFVNLLKTKYTSIADSKKFISSFDRIMYVPEEDLFEFALDYKNFSRTDADYIKKWKLYSYGNRIRIFRNPKKNNVFDWEEVCLTSAYKELFNKYGINYQQGDIRALLCEQSDKAFYSSFMALMSLMLQMRNSITGRTDVDFLISPVKNSDGIFYDSRNYEAQENAILPKNADANGAYNIARKVLWAIGQFKKAEDEKLDKVKIAISNKEWLEYAQTSVKH

SEQ ID NO: 289 - protein, 1398 aa, Synthetic construct
MSKLEKFTNCYSLSKTLRFKAIPVGKTQENIDNKRLLVEDEKRAEDYKGVKKLLDRYYLSFINDVLHSIKLKNLNNYISLFRKKTRTEKENKELENLEINLRKEIAKAFKGNEGYKSLFKKDIIETILPEFLDDKDEIALVNSFNGFTTAFTGFFDNRENMFSEEAKSTSIAFRCINENLTRYISNMDIFEKVDAIFDKHEVQEIKEKILNSDYDVEDFFEGEFFNFVLTQEGIDVYNAIIGGFVTESGGSSGSEAEEVIFGFADTTEITTTADAIECQISNDASIDETEKHQLVKSRRGQGIFRSRLEQVESRCRVTGVQLKNHLIASHIKPWAVSNNQERLDGHNGLLLAPHVDHLFDKGFISFEDNGEMIVSEKLNLDVLKAWSISQGNYGYFSKQQQEYMCYHRENVFKKLGSSGEKIKGLNEYINLYNQKTKQKLPKFKPLYKQVLSDRESLSFYGEGYTSDEEVLEVFRNTLNKNSEIFSSIKKLEKLFKNFDEYSSAGIFVKNGPAISTISKDIFGEWNVIRDKWNAEYDDIHLKKKAVVTEKYEDDRRKSFKKIGSFSLEQLQEYADADLSVVEKLKEIIIQKVDEIYKVYGSSEKLFDADFVLEKSLKKNDAVVAIMKDLLDSVKSFENYIKAFFGEGKETNRDESFYGDFVLAYDILLKVDHIYDAIRNYVTQKPYSKDKFKLYFQNPQFMGGWDKDKETDYRATILRYGSKYYLAIMDKKYAKCLQKIDKDDVNGNYEKINYKLLPGPNKMLPKVFFSKKWMAYYNPSEDIQKIYKNGTFKKGDMFNLNDCHKLIDFFKDSISRYPKWSNAYDFNFSETEKYKDIAGFYREVEEQGYKVSFESASKKEVDKLVEEGKLYMFQIYNKDFSDKSHGTPNLHTMYFKLLFDENNHGQIRLSGGAELFMRRASLKKEELVVHPANSPIANKNPDNPKKTTTLSYDVYKDKRFSEDQYELHIPIAINKCPKNIFKINTEVRVLLKHDDNPYVIGIARGERNLLYIVVVDGKGNIVEQYSLNEIINNFNGIRIKTDYHSLLDKKEKERFEARQNWTSIENIKELKAGYISQVVHKICELVEKYDAVIALEDLNSGFKNSRVKVEKQVYQKFEKMLIDKLNYMVDKKSNPCATGGALKGYQITNKFESFKSMSTQNGFIFYIPAWLTSKIDPSTGFVNLLKTKYTSIADSKKFISSFDRIMYVPEEDLFEFALDYKNFSRTDADYIKKWKLYSYGNRIRIFRNPKKNNVFDWEEVCLTSAYKELFNKYGINYQQGDIRALLCEQSDKAFYSSFMALMSLMLQMRNSITGRTDVDFLISPVKNSDGIFYDSRNYEAQENAILPKNADANGAYNIARKVLWAIGQFKKAEDEKLDKVKIAISNKEWLEYAQTSVKH

SEQ ID NO: 290 - protein, 1352 aa, Synthetic construct
MSKLEKFTNCYSLSKTLRFKAIPVGKTQENIDNKRLLVEDEKRAEDYKGVKKLLDRYYLSFINDVLHSIKLKNLNNYISLFRKKTRTEKENKELENLEINLRKEIAKAFKGNEGYKSLFKKDIIETILPEFLDDKDEIALVNSFNGFTTAFTGFFDNRENMFSEEAKSTSIAFRCINENLTRYISNMDIFEKVDAIFDKHEVQEIKEKILNSDYDVEDFFEGEFFNFVLTQEGIDVYNAIIGGFVTESGGSSGFPNFVGEPKSKDILKLRLYEQQHGKCLYSGKEINLGRLNEKGYVEIDHALPFSRTWDDSFNNKVLVLGSENQNKGNQTPYEYFNGKDNSREWQEFKARVETSRFPRSKKQRILLQKGSSGEKIKGLNEYINLYNQKTKQKLPKFKPLYKQVLSDRESLSFYGEGYTSDEEVLEVFRNTLNKNSEIFSSIKKLEKLFKNFDEYSSAGIFVKNGPAISTISKDIFGEWNVIRDKWNAEYDDIHLKKKAVVTEKYEDDRRKSFKKIGSFSLEQLQEYADADLSVVEKLKEIIIQKVDEIYKVYGSSEKLFDADFVLEKSLKKNDAVVAIMKDLLDSVKSFENYIKAFFGEGKETNRDESFYGDFVLAYDILLKVDHIYDAIRNYVTQKPYSKDKFKLYFQNPQFMGGWDKDKETDYRATILRYGSKYYLAIMDKKYAKCLQKIDKDDVNGNYEKINYKLLPGPNKMLPKVFFSKKWMAYYNPSEDIQKIYKNGTFKKGDMFNLNDCHKLIDFFKDSISRYPKWSNAYDFNFSETEKYKDIAGFYREVEEQGYKVSFESASKKEVDKLVEEGKLYMFQIYNKDFSDKSHGTPNLHTMYFKLLFDENNHGQIRLSGGAELFMRRASLKKEELVVHPANSPIANKNPDNPKKTTTLSYDVYKDKRFSEDQYELHIPIAINKCPKNIFKINTEVRVLLKHDDNPYVIGIARGERNLLYIVVVDGKGNIVEQYSLNEIINNFNGIRIKTDYHSLLDKKEKERFEARQNWTSIENIKELKAGYISQVVHKICELVEKYDAVIALEDLNSGFKNSRVKVEKQVYQKFEKMLIDKLNYMVDKKSNPCATGGALKGYQITNKFESFKSMSTQNGFIFYIPAWLTSKIDPSTGFVNLLKTKYTSIADSKKFISSFDRIMYVPEEDLFEFALDYKNFSRTDADYIKKWKLYSYGNRIRIFRNPKKNNVFDWEEVCLTSAYKELFNKYGINYQQGDIRALLCEQSDKAFYSSFMALMSLMLQMRNSITGRTDVDFLISPVKNSDGIFYDSRNYEAQENAILPKNADANGAYNIARKVLWAIGQFKKAEDEKLDKVKIAISNKEWLEYAQTSVKH

SEQ ID NO: 291 - protein, 1386 aa, Synthetic construct
MSKLEKFTNCYSLSKTLRFKAIPVGKTQENIDNKRLLVEDEKRAEDYKGVKKLLDRYYLSFINDVLHSIKLKNLNNYISLFRKKTRTEKENKELENLEINLRKEIAKAFKGNEGYKSLFKKDIIETILPEFLDDKDEIALVNSFNGFTTAFTGFFDNRENMFSEEAKSTSIAFRCINENLTRYISNMDIFEKVDAIFDKHEVQEIKEKILNSDYDVEDFFEGEFFNFVLTQEGIDVYNAIIGGFVTESGGSSGENQYTNQGKSNSQQRLKRLEKSLKELGSKILKENIPAKLSKIDNNALQNDRLYLYYLQNGKDMYTGDDLDIDRLSNYDIDHIIPQAFLKDNSIDNKVLVSSASNRGKSDDFPSLEVVKKRKTFWYQLLKSKLISQRKFDNLTKAERGGLLGSSGEKIKGLNEYINLYNQKTKQKLPKFKPLYKQVLSDRESLSFYGEGYTSDEEVLEVFRNTLNKNSEIFSSIKKLEKLFKNFDEYSSAGIFVKNGPAISTISKDIFGEWNVIRDKWNAEYDDIHLKKKAVVTEKYEDDRRKSFKKIGSFSLEQLQEYADADLSVVEKLKEIIIQKVDEIYKVYGSSEKLFDADFVLEKSLKKNDAVVAIMKDLLDSVKSFENYIKAFFGEGKETNRDESFYGDFVLAYDILLKVDHIYDAIRNYVTQKPYSKDKFKLYFQNPQFMGGWDKDKETDYRATILRYGSKYYLAIMDKKYAKCLQKIDKDDVNGNYEKINYKLLPGPNKMLPKVFFSKKWMAYYNPSEDIQKIYKNGTFKKGDMFNLNDCHKLIDFFKDSISRYPKWSNAYDFNFSETEKYKDIAGFYREVEEQGYKVSFESASKKEVDKLVEEGKLYMFQIYNKDFSDKSHGTPNLHTMYFKLLFDENNHGQIRLSGGAELFMRRASLKKEELVVHPANSPIANKNPDNPKKTTTLSYDVYKDKRFSEDQYELHIPIAINKCPKNIFKINTEVRVLLKHDDNPYVIGIARGERNLLYIVVVDGKGNIVEQYSLNEIINNFNGIRIKTDYHSLLDKKEKERFEARQNWTSIENIKELKAGYISQVVHKICELVEKYDAVIALEDLNSGFKNSRVKVEKQVYQKFEKMLIDKLNYMVDKKSNPCATGGALKGYQITNKFESFKSMSTQNGFIFYIPAWLTSKIDPSTGFVNLLKTKYTSIADSKKFISSFDRIMYVPEEDLFEFALDYKNFSRTDADYIKKWKLYSYGNRIRIFRNPKKNNVFDWEEVCLTSAYKELFNKYGINYQQGDIRALLCEQSDKAFYSSFMALMSLMLQMRNSITGRTDVDFLISPVKNSDGIFYDSRNYEAQENAILPKNADANGAYNIARKVLWAIGQFKKAEDEKLDKVKIAISNKEWLEYAQTSVKH

SEQ ID NO: 292 - protein, 1340 aa, Synthetic construct
MSKLEKFTNCYSLSKTLRFKAIPVGKTQENIDNKRLLVEDEKRAEDYKGVKKLLDRYYLSFINDVLHSIKLKNLNNYISLFRKKTRTEKENKELENLEINLRKEIAKAFKGNEGYKSLFKKDIIETILPEFLDDKDEIALVNSFNGFTTAFTGFFDNRENMFSEEAKSTSIAFRCINENLTRYISNMDIFEKVDAIFDKHEVQEIKEKILNSDYDVEDFFEGEFFNFVLTQEGIDVYNAIIGGFVTESGGSSGDGNAHTVNPSKLVSHRLGDGLTVQQIDRACTPALWCALTREKDFDEKNGLPAREDRAIRVHGHEIKSSDYIQVFSKRKKTDSDRDETPFGAIAVRGGFVEIGPSGSSGEKIKGLNEYINLYNQKTKQKLPKFKPLYKQVLSDRESLSFYGEGYTSDEEVLEVFRNTLNKNSEIFSSIKKLEKLFKNFDEYSSAGIFVKNGPAISTISKDIFGEWNVIRDKWNAEYDDIHLKKKAVVTEKYEDDRRKSFKKIGSFSLEQLQEYADADLSVVEKLKEIIIQKVDEIYKVYGSSEKLFDADFVLEKSLKKNDAVVAIMKDLLDSVKSFENYIKAFFGEGKETNRDESFYGDFVLAYDILLKVDHIYDAIRNYVTQKPYSKDKFKLYFQNPQFMGGWDKDKETDYRATILRYGSKYYLAIMDKKYAKCLQKIDKDDVNGNYEKINYKLLPGPNKMLPKVFFSKKWMAYYNPSEDIQKIYKNGTFKKGDMFNLNDCHKLIDFFKDSISRYPKWSNAYDFNFSETEKYKDIAGFYREVEEQGYKVSFESASKKEVDKLVEEGKLYMFQIYNKDFSDKSHGTPNLHTMYFKLLFDENNHGQIRLSGGAELFMRRASLKKEELVVHPANSPIANKNPDNPKKTTTLSYDVYKDKRFSEDQYELHIPIAINKCPKNIFKINTEVRVLLKHDDNPYVIGIARGERNLLYIVVVDGKGNIVEQYSLNEIINNFNGIRIKTDYHSLLDKKEKERFEARQNWTSIENIKELKAGYISQVVHKICELVEKYDAVIALEDLNSGFKNSRVKVEKQVYQKFEKMLIDKLNYMVDKKSNPCATGGALKGYQITNKFESFKSMSTQNGFIFYIPAWLTSKIDPSTGFVNLLKTKYTSIADSKKFISSFDRIMYVPEEDLFEFALDYKNFSRTDADYIKKWKLYSYGNRIRIFRNPKKNNVFDWEEVCLTSAYKELFNKYGINYQQGDIRALLCEQSDKAFYSSFMALMSLMLQMRNSITGRTDVDFLISPVKNSDGIFYDSRNYEAQENAILPKNADANGAYNIARKVLWAIGQFKKAEDEKLDKVKIAISNKEWLEYAQTSVKH

SEQ ID NO: 293 - protein, 1387 aa, Synthetic construct
MSKLEKFTNCYSLSKTLRFKAIPVGKTQENIDNKRLLVEDEKRAEDYKGVKKLLDRYYLSFINDVLHSIKLKNLNNYISLFRKKTRTEKENKELENLEINLRKEIAKAFKGNEGYKSLFKKDIIETILPEFLDDKDEIALVNSFNGFTTAFTGFFDNRENMFSEEAKSTSIAFRCINENLTRYISNMDIFEKVDAIFDKHEVQEIKEKILNSDYDVEDFFEGEFFNFVLTQEGIDVYNAIIGGFVTESGGSSGEKNSKDAQKMINEMQKRNRQTNERIEEIIRTTGKENAKYLIEKIKLHDMQEGKCLYSLEAIPLEDLLNNPFNYEVDHIIPRSVSFDNSFNNKVLVKQEENSKKGNRTPFQYLSSSDSKISYETFKKHILNLAKGKGRISKTKKEYLLEERDGSSGEKIKGLNEYINLYNQKTKQKLPKFKPLYKQVLSDRESLSFYGEGYTSDEEVLEVFRNTLNKNSEIFSSIKKLEKLFKNFDEYSSAGIFVKNGPAISTISKDIFGEWNVIRDKWNAEYDDIHLKKKAVVTEKYEDDRRKSFKKIGSFSLEQLQEYADADLSVVEKLKEIIIQKVDEIYKVYGSSEKLFDADFVLEKSLKKNDAVVAIMKDLLDSVKSFENYIKAFFGEGKETNRDESFYGDFVLAYDILLKVDHIYDAIRNYVTQKPYSKDKFKLYFQNPQFMGGWDKDKETDYRATILRYGSKYYLAIMDKKYAKCLQKIDKDDVNGNYEKINYKLLPGPNKMLPKVFFSKKWMAYYNPSEDIQKIYKNGTFKKGDMFNLNDCHKLIDFFKDSISRYPKWSNAYDFNFSETEKYKDIAGFYREVEEQGYKVSFESASKKEVDKLVEEGKLYMFQIYNKDFSDKSHGTPNLHTMYFKLLFDENNHGQIRLSGGAELFMRRASLKKEELVVHPANSPIANKNPDNPKKTTTLSYDVYKDKRFSEDQYELHIPIAINKCPKNIFKINTEVRVLLKHDDNPYVIGIARGERNLLYIVVVDGKGNIVEQYSLNEIINNFNGIRIKTDYHSLLDKKEKERFEARQNWTSIENIKELKAGYISQVVHKICELVEKYDAVIALEDLNSGFKNSRVKVEKQVYQKFEKMLIDKLNYMVDKKSNPCATGGALKGYQITNKFESFKSMSTQNGFIFYIPAWLTSKIDPSTGFVNLLKTKYTSIADSKKFISSFDRIMYVPEEDLFEFALDYKNFSRTDADYIKKWKLYSYGNRIRIFRNPKKNNVFDWEEVCLTSAYKELFNKYGINYQQGDIRALLCEQSDKAFYSSFMALMSLMLQMRNSITGRTDVDFLISPVKNSDGIFYDSRNYEAQENAILPKNADANGAYNIARKVLWAIGQFKKAEDEKLDKVKIAISNKEWLEYAQTSVKH

SEQ ID NO: 294 - protein, 1485 aa, Synthetic construct
MSKLEKFTNCYSLSKTLRFKAIPVGKTQENIDNKRLLVEDEKRAEDYKGVKKLLDRYYLSFINDVLHSIKLKNLNNYISLFRKKTRTEKENKELENLEINLRKEIAKAFKGNEGYKSLFKKDIIETILPEFLDDKDEIALVNSFNGFTTAFTGFFDNRENMFSEEAKSTSIAFRCINENLTRYISNMDIFEKVDAIFDKHEVQEIKEKILNSDYDVEDFFEGEFFNFVLTQEGIDVYNAIIGGFVTESGGSSGADLPALPGGPAGGTGELAKYGLPGVAQLRSRESYVLSYDPRTRGALWVLEQLRPERLRGDGDRSACDFREDDSVHAYHRATNADYRGSGFDRGHLAAAANHRWSQRAMDDTFYLSNVAPQVPHLNQNAWNNLERYSRSLTRTYQNVYVCTGPLFLPRTEADGKSYVKYQVIGKNHVAVPTHFFKVLILEAAGGQIELRSYVMPNAPVDETIPLERFLVPIESIERASGLLFVPNILARAGNLKAITAGSGSSGEKIKGLNEYINLYNQKTKQKLPKFKPLYKQVLSDRESLSFYGEGYTSDEEVLEVFRNTLNKNSEIFSSIKKLEKLFKNFDEYSSAGIFVKNGPAISTISKDIFGEWNVIRDKWNAEYDDIHLKKKAVVTEKYEDDRRKSFKKIGSFSLEQLQEYADADLSVVEKLKEIIIQKVDEIYKVYGSSEKLFDADFVLEKSLKKNDAVVAIMKDLLDSVKSFENYIKAFFGEGKETNRDESFYGDFVLAYDILLKVDHIYDAIRNYVTQKPYSKDKFKLYFQNPQFMGGWDKDKETDYRATILRYGSKYYLAIMDKKYAKCLQKIDKDDVNGNYEKINYKLLPGPNKMLPKVFFSKKWMAYYNPSEDIQKIYKNGTFKKGDMFNLNDCHKLIDFFKDSISRYPKWSNAYDFNFSETEKYKDIAGFYREVEEQGYKVSFESASKKEVDKLVEEGKLYMFQIYNKDFSDKSHGTPNLHTMYFKLLFDENNHGQIRLSGGAELFMRRASLKKEELVVHPANSPIANKNPDNPKKTTTLSYDVYKDKRFSEDQYELHIPIAINKCPKNIFKINTEVRVLLKHDDNPYVIGIARGERNLLYIVVVDGKGNIVEQYSLNEIINNFNGIRIKTDYHSLLDKKEKERFEARQNWTSIENIKELKAGYISQVVHKICELVEKYDAVIALEDLNSGFKNSRVKVEKQVYQKFEKMLIDKLNYMVDKKSNPCATGGALKGYQITNKFESFKSMSTQNGFIFYIPAWLTSKIDPSTGFVNLLKTKYTSIADSKKFISSFDRIMYVPEEDLFEFALDYKNFSRTDADYIKKWKLYSYGNRIRIFRNPKKNNVFDWEEVCLTSAYKELFNKYGINYQQGDIRALLCEQSDKAFYSSFMALMSLMLQMRNSITGRTDVDFLISPVKNSDGIFYDSRNYEAQENAILPKNADANGAYNIARKVLWAIGQFKKAEDEKLDKVKIAISNKEWLEYAQTSVKH

SEQ ID NO: 295 - protein, 1443 aa, Synthetic construct
MSKLEKFTNCYSLSKTLRFKAIPVGKTQENIDNKRLLVEDEKRAEDYKGVKKLLDRYYLSFINDVLHSIKLKNLNNYISLFRKKTRTEKENKELENLEINLRKEIAKAFKGNEGYKSLFKKDIIETILPEFLDDKDEIALVNSFNGFTTAFTGFFDNRENMFSEEAKSTSIAFRCINENLTRYISNMDIFEKVDAIFDKHEVQEIKEKILNSDYDVEDFFEGEFFNFVLTQEGIDVYNAIIGGFVTESGGSSGSFSHAKNEAVKIYRDHPVSFYCGCEIRWQGKKGIPDLESCGYQVRKNENRASRIEWEHVVPAWQFGHQLQCWQQGGRKNCTRTSPEFNQMEADLHNLTPAIGEVNGDRSNFSFSQWNGVDGVTYGQCEMQVNFKERTAMPPERARGAIARTYLYMSEQYGLRLSKAQSQLMQAWNNQYPVSEWECVRDQRIEKVQGNSNRFVREQCPGSSGEKIKGLNEYINLYNQKTKQKLPKFKPLYKQVLSDRESLSFYGEGYTSDEEVLEVFRNTLNKNSEIFSSIKKLEKLFKNFDEYSSAGIFVKNGPAISTISKDIFGEWNVIRDKWNAEYDDIHLKKKAVVTEKYEDDRRKSFKKIGSFSLEQLQEYADADLSVVEKLKEIIIQKVDEIYKVYGSSEKLFDADFVLEKSLKKNDAVVAIMKDLLDSVKSFENYIKAFFGEGKETNRDESFYGDFVLAYDILLKVDHIYDAIRNYVTQKPYSKDKFKLYFQNPQFMGGWDKDKETDYRATILRYGSKYYLAIMDKKYAKCLQKIDKDDVNGNYEKINYKLLPGPNKMLPKVFFSKKWMAYYNPSEDIQKIYKNGTFKKGDMFNLNDCHKLIDFFKDSISRYPKWSNAYDFNFSETEKYKDIAGFYREVEEQGYKVSFESASKKEVDKLVEEGKLYMFQIYNKDFSDKSHGTPNLHTMYFKLLFDENNHGQIRLSGGAELFMRRASLKKEELVVHPANSPIANKNPDNPKKTTTLSYDVYKDKRFSEDQYELHIPIAINKCPKNIFKINTEVRVLLKHDDNPYVIGIARGERNLLYIVVVDGKGNIVEQYSLNEIINNFNGIRIKTDYHSLLDKKEKERFEARQNWTSIENIKELKAGYISQVVHKICELVEKYDAVIALEDLNSGFKNSRVKVEKQVYQKFEKMLIDKLNYMVDKKSNPCATGGALKGYQITNKFESFKSMSTQNGFIFYIPAWLTSKIDPSTGFVNLLKTKYTSIADSKKFISSFDRIMYVPEEDLFEFALDYKNFSRTDADYIKKWKLYSYGNRIRIFRNPKKNNVFDWEEVCLTSAYKELFNKYGINYQQGDIRALLCEQSDKAFYSSFMALMSLMLQMRNSITGRTDVDFLISPVKNSDGIFYDSRNYEAQENAILPKNADANGAYNIARKVLWAIGQFKKAEDEKLDKVKIAISNKEWLEYAQTSVKH

SEQ ID NO: 296 - protein, 1333 aa, Synthetic construct
MSKLEKFTNCYSLSKTLRFKAIPVGKTQENIDNKRLLVEDEKRAEDYKGVKKLLDRYYLSFINDVLHSIKLKNLNNYISLFRKKTRTEKENKELENLEINLRKEIAKAFKGNEGYKSLFKKDIIETILPEFLDDKDEIALVNSFNGFTTAFTGFFDNRENMFSEEAKSTSIAFRCINENLTRYISNMDIFEKVDAIFDKHEVQEIKEKILNSDYDVEDFFEGEFFNFVLTQEGIDVYNAIIGGFVTESGGSSGMLLTGKLYKEEKQKFYDAQNGKCLICQRELNPDVQANHLDHDHELNGPKAGKVRGLLCNLCNAAEGQMKHKFNRSGLKGQGVDYLEWLENLLTYLKSGSSGEKIKGLNEYINLYNQKTKQKLPKFKPLYKQVLSDRESLSFYGEGYTSDEEVLEVFRNTLNKNSEIFSSIKKLEKLFKNFDEYSSAGIFVKNGPAISTISKDIFGEWNVIRDKWNAEYDDIHLKKKAVVTEKYEDDRRKSFKKIGSFSLEQLQEYADADLSVVEKLKEIIIQKVDEIYKVYGSSEKLFDADFVLEKSLKKNDAVVAIMKDLLDSVKSFENYIKAFFGEGKETNRDESFYGDFVLAYDILLKVDHIYDAIRNYVTQKPYSKDKFKLYFQNPQFMGGWDKDKETDYRATILRYGSKYYLAIMDKKYAKCLQKIDKDDVNGNYEKINYKLLPGPNKMLPKVFFSKKWMAYYNPSEDIQKIYKNGTFKKGDMFNLNDCHKLIDFFKDSISRYPKWSNAYDFNFSETEKYKDIAGFYREVEEQGYKVSFESASKKEVDKLVEEGKLYMFQIYNKDFSDKSHGTPNLHTMYFKLLFDENNHGQIRLSGGAELFMRRASLKKEELVVHPANSPIANKNPDNPKKTTTLSYDVYKDKRFSEDQYELHIPIAINKCPKNIFKINTEVRVLLKHDDNPYVIGIARGERNLLYIVVVDGKGNIVEQYSLNEIINNFNGIRIKTDYHSLLDKKEKERFEARQNWTSIENIKELKAGYISQVVHKICELVEKYDAVIALEDLNSGFKNSRVKVEKQVYQKFEKMLIDKLNYMVDKKSNPCATGGALKGYQITNKFESFKSMSTQNGFIFYIPAWLTSKIDPSTGFVNLLKTKYTSIADSKKFISSFDRIMYVPEEDLFEFALDYKNFSRTDADYIKKWKLYSYGNRIRIFRNPKKNNVFDWEEVCLTSAYKELFNKYGINYQQGDIRALLCEQSDKAFYSSFMALMSLMLQMRNSITGRTDVDFLISPVKNSDGIFYDSRNYEAQENAILPKNADANGAYNIARKVLWAIGQFKKAEDEKLDKVKIAISNKEWLEYAQTSVKH

SEQ ID NO: 297 - protein, 1322 aa, Synthetic construct
MSKLEKFTNCYSLSKTLRFKAIPVGKTQENIDNKRLLVEDEKRAEDYKGVKKLLDRYYLSFINDVLHSIKLKNLNNYISLFRKKTRTEKENKELENLEINLRKEIAKAFKGNEGYKSLFKKDIIETILPEFLDDKDEIALVNSFNGFTTAFTGFFDNRENMFSEEAKSTSIAFRCINENLTRYISNMDIFEKVDAIFDKHEVQEIKEKILNSDYDVEDFFEGEFFNFVLTQEGIDVYNAIIGGFVTESGGSSGMELKHSISDYTEAEFLQLVTTICNADTSSEEELVKLVTHFEEMTEHPSGSDLIYYPKEGDDDSPSGIVNTVKQWRAANGKSGFKQGGSSGEKIKGLNEYINLYNQKTKQKLPKFKPLYKQVLSDRESLSFYGEGYTSDEEVLEVFRNTLNKNSEIFSSIKKLEKLFKNFDEYSSAGIFVKNGPAISTISKDIFGEWNVIRDKWNAEYDDIHLKKKAVVTEKYEDDRRKSFKKIGSFSLEQLQEYADADLSVVEKLKEIIIQKVDEIYKVYGSSEKLFDADFVLEKSLKKNDAVVAIMKDLLDSVKSFENYIKAFFGEGKETNRDESFYGDFVLAYDILLKVDHIYDAIRNYVTQKPYSKDKFKLYFQNPQFMGGWDKDKETDYRATILRYGSKYYLAIMDKKYAKCLQKIDKDDVNGNYEKINYKLLPGPNKMLPKVFFSKKWMAYYNPSEDIQKIYKNGTFKKGDMFNLNDCHKLIDFFKDSISRYPKWSNAYDFNFSETEKYKDIAGFYREVEEQGYKVSFESASKKEVDKLVEEGKLYMFQIYNKDFSDKSHGTPNLHTMYFKLLFDENNHGQIRLSGGAELFMRRASLKKEELVVHPANSPIANKNPDNPKKTTTLSYDVYKDKRFSEDQYELHIPIAINKCPKNIFKINTEVRVLLKHDDNPYVIGIARGERNLLYIVVVDGKGNIVEQYSLNEIINNFNGIRIKTDYHSLLDKKEKERFEARQNWTSIENIKELKAGYISQVVHKICELVEKYDAVIALEDLNSGFKNSRVKVEKQVYQKFEKMLIDKLNYMVDKKSNPCATGGALKGYQITNKFESFKSMSTQNGFIFYIPAWLTSKIDPSTGFVNLLKTKYTSIADSKKFISSFDRIMYVPEEDLFEFALDYKNFSRTDADYIKKWKLYSYGNRIRIFRNPKKNNVFDWEEVCLTSAYKELFNKYGINYQQGDIRALLCEQSDKAFYSSFMALMSLMLQMRNSITGRTDVDFLISPVKNSDGIFYDSRNYEAQENAILPKNADANGAYNIARKVLWAIGQFKKAEDEKLDKVKIAISNKEWLEYAQTSVKH

SEQ ID NO: 298 - protein, 1503 aa, Synthetic construct
MSKLEKFTNCYSLSKTLRFKAIPVGKTQENIDNKRLLVEDEKRAEDYKGVKKLLDRYYLSFINDVLHSIKLKNLNNYISLFRKKTRTEKENKELENLEINLRKEIAKAFKGNEGYKSLFKKDIIETILPEFLDDKDEIALVNSFNGFTTAFTGFFDNRENMFSEEAKSTSIAFRCINENLTRYISNMDIFEKVDAIFDKHEVQEIKEKILNSDYDVEDFFEGEFFNFVLTQEGIDVYNAIIGGFVTESGGSSGWGNLGHETVAYIAQSFVASSTESFCQNILGDDSTSYLANVATWADTYKYTDAGEFSKPYHFIDAQDNPPQSCGVDYDRDCGSAGCSISAIQNYTNILLESPNGSEALNALKFVVHIIGDIHQPLHDENLEAGGNGIDVTYDGETTNLHHIWDTNMPEEAAGGYSLSVAKTYADLLTERIKTGTYSSKKDSWTDGIDIKDPVSTSMIWAADANTYVCSTVLDDGLAYINSTDLSGEYYDKSQPVFEELIAKAGYRLAAWLDLIASQPSGSSGEKIKGLNEYINLYNQKTKQKLPKFKPLYKQVLSDRESLSFYGEGYTSDEEVLEVFRNTLNKNSEIFSSIKKLEKLFKNFDEYSSAGIFVKNGPAISTISKDIFGEWNVIRDKWNAEYDDIHLKKKAVVTEKYEDDRRKSFKKIGSFSLEQLQEYADADLSVVEKLKEIIIQKVDEIYKVYGSSEKLFDADFVLEKSLKKNDAVVAIMKDLLDSVKSFENYIKAFFGEGKETNRDESFYGDFVLAYDILLKVDHIYDAIRNYVTQKPYSKDKFKLYFQNPQFMGGWDKDKETDYRATILRYGSKYYLAIMDKKYAKCLQKIDKDDVNGNYEKINYKLLPGPNKMLPKVFFSKKWMAYYNPSEDIQKIYKNGTFKKGDMFNLNDCHKLIDFFKDSISRYPKWSNAYDFNFSETEKYKDIAGFYREVEEQGYKVSFESASKKEVDKLVEEGKLYMFQIYNKDFSDKSHGTPNLHTMYFKLLFDENNHGQIRLSGGAELFMRRASLKKEELVVHPANSPIANKNPDNPKKTTTLSYDVYKDKRFSEDQYELHIPIAINKCPKNIFKINTEVRVLLKHDDNPYVIGIARGERNLLYIVVVDGKGNIVEQYSLNEIINNFNGIRIKTDYHSLLDKKEKERFEARQNWTSIENIKELKAGYISQVVHKICELVEKYDAVIALEDLNSGFKNSRVKVEKQVYQKFEKMLIDKLNYMVDKKSNPCATGGALKGYQITNKFESFKSMSTQNGFIFYIPAWLTSKIDPSTGFVNLLKTKYTSIADSKKFISSFDRIMYVPEEDLFEFALDYKNFSRTDADYIKKWKLYSYGNRIRIFRNPKKNNVFDWEEVCLTSAYKELFNKYGINYQQGDIRALLCEQSDKAFYSSFMALMSLMLQMRNSITGRTDVDFLISPVKNSDGIFYDSRNYEAQENAILPKNADANGAYNIARKVLWAIGQFKKAEDEKLDKVKIAISNKEWLEYAQTSVKH

SEQ ID NO: 299 - protein, 1506 aa, Synthetic construct
MSKLEKFTNCYSLSKTLRFKAIPVGKTQENIDNKRLLVEDEKRAEDYKGVKKLLDRYYLSFINDVLHSIKLKNLNNYISLFRKKTRTEKENKELENLEINLRKEIAKAFKGNEGYKSLFKKDIIETILPEFLDDKDEIALVNSFNGFTTAFTGFFDNRENMFSEEAKSTSIAFRCINENLTRYISNMDIFEKVDAIFDKHEVQEIKEKILNSDYDVEDFFEGEFFNFVLTQEGIDVYNAIIGGFVTESGGSSGWGALGHATVAYVAQHYVSPEAASWAQGILGSSSSSYLASIASWADEYRLTSAGKWSASLHFIDAEDNPPTNCNVDYERDCGSSGCSISAIANYTQRVSDSSLSSENHAEALRFLVHFIGDMTQPLHDEAYAVGGNKINVTFDGYHDNLHSDWDTYMPQKLIGGHALSDAESWAKTLVQNIESGNYTAQAIGWIKGDNISEPITTATRWASDANALVCTVVMPHGAAALQTGDLYPTYYDSVIDTIELQIAKGGYRLANWINEIHGSEIAKGSSGEKIKGLNEYINLYNQKTKQKLPKFKPLYKQVLSDRESLSFYGEGYTSDEEVLEVFRNTLNKNSEIFSSIKKLEKLFKNFDEYSSAGIFVKNGPAISTISKDIFGEWNVIRDKWNAEYDDIHLKKKAVVTEKYEDDRRKSFKKIGSFSLEQLQEYADADLSVVEKLKEIIIQKVDEIYKVYGSSEKLFDADFVLEKSLKKNDAVVAIMKDLLDSVKSFENYIKAFFGEGKETNRDESFYGDFVLAYDILLKVDHIYDAIRNYVTQKPYSKDKFKLYFQNPQFMGGWDKDKETDYRATILRYGSKYYLAIMDKKYAKCLQKIDKDDVNGNYEKINYKLLPGPNKMLPKVFFSKKWMAYYNPSEDIQKIYKNGTFKKGDMFNLNDCHKLIDFFKDSISRYPKWSNAYDFNFSETEKYKDIAGFYREVEEQGYKVSFESASKKEVDKLVEEGKLYMFQIYNKDFSDKSHGTPNLHTMYFKLLFDENNHGQIRLSGGAELFMRRASLKKEELVVHPANSPIANKNPDNPKKTTTLSYDVYKDKRFSEDQYELHIPIAINKCPKNIFKINTEVRVLLKHDDNPYVIGIARGERNLLYIVVVDGKGNIVEQYSLNEIINNFNGIRIKTDYHSLLDKKEKERFEARQNWTSIENIKELKAGYISQVVHKICELVEKYDAVIALEDLNSGFKNSRVKVEKQVYQKFEKMLIDKLNYMVDKKSNPCATGGALKGYQITNKFESFKSMSTQNGFIFYIPAWLTSKIDPSTGFVNLLKTKYTSIADSKKFISSFDRIMYVPEEDLFEFALDYKNFSRTDADYIKKWKLYSYGNRIRIFRNPKKNNVFDWEEVCLTSAYKELFNKYGINYQQGDIRALLCEQSDKAFYSSFMALMSLMLQMRNSITGRTDVDFLISPVKNSDGIFYDSRNYEAQENAILPKNADANGAYNIARKVLWAIGQFKKAEDEKLDKVKIAISNKEWLEYAQTSVKH

SEQ ID NO: 300 - protein, 1341 aa, Synthetic construct
MSKLEKFTNCYSLSKTLRFKAIPVGKTQENIDNKRLLVEDEKRAEDYKGVKKLLDRYYLSFINDVLHSIKLKNLNNYISLFRKKTRTEKENKELENLEINLRKEIAKAFKGNEGYKSLFKKDIIETILPEFLDDKDEIALVNSFNGFTTAFTGFFDNRENMFSEEAKSTSIAFRCINENLTRYISNMDIFEKVDAIFDKHEVQEIKEKILNSDYDVEDFFEGEFFNFVLTQEGIDVYNAIIGGFVTESGGSSGMEWKDIKGYEGHYQVSNTGEVYSIKSGKTLKHQIPKDGYHRIGLFKGGKGKTFQVHRLVAIHFCEGYEEGLVVDHKDGNKDNNLSTNLRWVTQKINVENQMSRGTGSSGEKIKGLNEYINLYNQKTKQKLPKFKPLYKQVLSDRESLSFYGEGYTSDEEVLEVFRNTLNKNSEIFSSIKKLEKLFKNFDEYSSAGIFVKNGPAISTISKDIFGEWNVIRDKWNAEYDDIHLKKKAVVTEKYEDDRRKSFKKIGSFSLEQLQEYADADLSVVEKLKEIIIQKVDEIYKVYGSSEKLFDADFVLEKSLKKNDAVVAIMKDLLDSVKSFENYIKAFFGEGKETNRDESFYGDFVLAYDILLKVDHIYDAIRNYVTQKPYSKDKFKLYFQNPQFMGGWDKDKETDYRATILRYGSKYYLAIMDKKYAKCLQKIDKDDVNGNYEKINYKLLPGPNKMLPKVFFSKKWMAYYNPSEDIQKIYKNGTFKKGDMFNLNDCHKLIDFFKDSISRYPKWSNAYDFNFSETEKYKDIAGFYREVEEQGYKVSFESASKKEVDKLVEEGKLYMFQIYNKDFSDKSHGTPNLHTMYFKLLFDENNHGQIRLSGGAELFMRRASLKKEELVVHPANSPIANKNPDNPKKTTTLSYDVYKDKRFSEDQYELHIPIAINKCPKNIFKINTEVRVLLKHDDNPYVIGIARGERNLLYIVVVDGKGNIVEQYSLNEIINNFNGIRIKTDYHSLLDKKEKERFEARQNWTSIENIKELKAGYISQVVHKICELVEKYDAVIALEDLNSGFKNSRVKVEKQVYQKFEKMLIDKLNYMVDKKSNPCATGGALKGYQITNKFESFKSMSTQNGFIFYIPAWLTSKIDPSTGFVNLLKTKYTSIADSKKFISSFDRIMYVPEEDLFEFALDYKNFSRTDADYIKKWKLYSYGNRIRIFRNPKKNNVFDWEEVCLTSAYKELFNKYGINYQQGDIRALLCEQSDKAFYSSFMALMSLMLQMRNSITGRTDVDFLISPVKNSDGIFYDSRNYEAQENAILPKNADANGAYNIARKVLWAIGQFKKAEDEKLDKVKIAISNKEWLEYAQTSVKH

SEQ ID NO: 301 - protein, 1346 aa, Synthetic construct
MSKLEKFTNCYSLSKTLRFKAIPVGKTQENIDNKRLLVEDEKRAEDYKGVKKLLDRYYLSFINDVLHSIKLKNLNNYISLFRKKTRTEKENKELENLEINLRKEIAKAFKGNEGYKSLFKKDIIETILPEFLDDKDEIALVNSFNGFTTAFTGFFDNRENMFSEEAKSTSIAFRCINENLTRYISNMDIFEKVDAIFDKHEVQEIKEKILNSDYDVEDFFEGEFFNFVLTQEGIDVYNAIIGGFVTESGGSSGGRTPTAEERRIANALGALPCIACYMHGVISNEVSLHHIAGRTAPGCHKKQLPLCRWHHQHAAPAEVREKYPWLVPVHADGVVGGKKEFTLLNKSEMELLADAYEMANIMHGSSGEKIKGLNEYINLYNQKTKQKLPKFKPLYKQVLSDRESLSFYGEGYTSDEEVLEVFRNTLNKNSEIFSSIKKLEKLFKNFDEYSSAGIFVKNGPAISTISKDIFGEWNVIRDKWNAEYDDIHLKKKAVVTEKYEDDRRKSFKKIGSFSLEQLQEYADADLSVVEKLKEIIIQKVDEIYKVYGSSEKLFDADFVLEKSLKKNDAVVAIMKDLLDSVKSFENYIKAFFGEGKETNRDESFYGDFVLAYDILLKVDHIYDAIRNYVTQKPYSKDKFKLYFQNPQFMGGWDKDKETDYRATILRYGSKYYLAIMDKKYAKCLQKIDKDDVNGNYEKINYKLLPGPNKMLPKVFFSKKWMAYYNPSEDIQKIYKNGTFKKGDMFNLNDCHKLIDFFKDSISRYPKWSNAYDFNFSETEKYKDIAGFYREVEEQGYKVSFESASKKEVDKLVEEGKLYMFQIYNKDFSDKSHGTPNLHTMYFKLLFDENNHGQIRLSGGAELFMRRASLKKEELVVHPANSPIANKNPDNPKKTTTLSYDVYKDKRFSEDQYELHIPIAINKCPKNIFKINTEVRVLLKHDDNPYVIGIARGERNLLYIVVVDGKGNIVEQYSLNEIINNFNGIRIKTDYHSLLDKKEKERFEARQNWTSIENIKELKAGYISQVVHKICELVEKYDAVIALEDLNSGFKNSRVKVEKQVYQKFEKMLIDKLNYMVDKKSNPCATGGALKGYQITNKFESFKSMSTQNGFIFYIPAWLTSKIDPSTGFVNLLKTKYTSIADSKKFISSFDRIMYVPEEDLFEFALDYKNFSRTDADYIKKWKLYSYGNRIRIFRNPKKNNVFDWEEVCLTSAYKELFNKYGINYQQGDIRALLCEQSDKAFYSSFMALMSLMLQMRNSITGRTDVDFLISPVKNSDGIFYDSRNYEAQENAILPKNADANGAYNIARKVLWAIGQFKKAEDEKLDKVKIAISNKEWLEYAQTSVKH

SEQ ID NO: 302 - protein, 1513 aa, Synthetic construct
MSKLEKFTNCYSLSKTLRFKAIPVGKTQENIDNKRLLVEDEKRAEDYKGVKKLLDRYYLSFINDVLHSIKLKNLNNYISLFRKKTRTEKENKELENLEINLRKEIAKAFKGNEGYKSLFKKDIIETILPEFLDDKDEIALVNSFNGFTTAFTGFFDNRENMFSEEAKSTSIAFRCINENLTRYISNMDIFEKVDAIFDKHEVQEIKEKILNSDYDVEDFFEGEFFNFVLTQEGIDVYNAIIGGFVTESGGSSGWSKEGHVMTCRIAQGLLNDEAAHAVKMLLPEYVNGDLSALCVWPDQVRHWYKYKWTSPLHFIDTPDKACNFDYERDCHDQHGVKDMCVAGAIQNFTTQLSHYREGTSDRRYNMTEALLFLSHFMGDIHQPMHVGFTSDAGGNSIDLRWFRHKSNLHHVWDREIILTAAKDYYAKDINLLEEDIEGNFTDGIWSDDLASWRECGNVFSCVNKFATESINIACKWGYKGVEAGETLSDDYFNSRLPIVMKRVAQGGIRLAMLLNNVFGASQQEDSVVATGSSGEKIKGLNEYINLYNQKTKQKLPKFKPLYKQVLSDRESLSFYGEGYTSDEEVLEVFRNTLNKNSEIFSSIKKLEKLFKNFDEYSSAGIFVKNGPAISTISKDIFGEWNVIRDKWNAEYDDIHLKKKAVVTEKYEDDRRKSFKKIGSFSLEQLQEYADADLSVVEKLKEIIIQKVDEIYKVYGSSEKLFDADFVLEKSLKKNDAVVAIMKDLLDSVKSFENYIKAFFGEGKETNRDESFYGDFVLAYDILLKVDHIYDAIRNYVTQKPYSKDKFKLYFQNPQFMGGWDKDKETDYRATILRYGSKYYLAIMDKKYAKCLQKIDKDDVNGNYEKINYKLLPGPNKMLPKVFFSKKWMAYYNPSEDIQKIYKNGTFKKGDMFNLNDCHKLIDFFKDSISRYPKWSNAYDFNFSETEKYKDIAGFYREVEEQGYKVSFESASKKEVDKLVEEGKLYMFQIYNKDFSDKSHGTPNLHTMYFKLLFDENNHGQIRLSGGAELFMRRASLKKEELVVHPANSPIANKNPDNPKKTTTLSYDVYKDKRFSEDQYELHIPIAINKCPKNIFKINTEVRVLLKHDDNPYVIGIARGERNLLYIVVVDGKGNIVEQYSLNEIINNFNGIRIKTDYHSLLDKKEKERFEARQNWTSIENIKELKAGYISQVVHKICELVEKYDAVIALEDLNSGFKNSRVKVEKQVYQKFEKMLIDKLNYMVDKKSNPCATGGALKGYQITNKFESFKSMSTQNGFIFYIPAWLTSKIDPSTGFVNLLKTKYTSIADSKKFISSFDRIMYVPEEDLFEFALDYKNFSRTDADYIKKWKLYSYGNRIRIFRNPKKNNVFDWEEVCLTSAYKELFNKYGINYQQGDIRALLCEQSDKAFYSSFMALMSLMLQMRNSITGRTDVDFLISPVKNSDGIFYDSRNYEAQENAILPKNADANGAYNIARKVLWAIGQFKKAEDEKLDKVKIAISNKEWLEYAQTSVKH

SEQ ID NO: 303 - protein, 1446 aa, Synthetic construct
MSKLEKFTNCYSLSKTLRFKAIPVGKTQENIDNKRLLVEDEKRAEDYKGVKKLLDRYYLSFINDVLHSIKLKNLNNYISLFRKKTRTEKENKELENLEINLRKEIAKAFKGNEGYKSLFKKDIIETILPEFLDDKDEIALVNSFNGFTTAFTGFFDNRENMFSEEAKSTSIAFRCINENLTRYISNMDIFEKVDAIFDKHEVQEIKEKILNSDYDVEDFFEGEFFNFVLTQEGIDVYNAIIGGFVTESGGSSGPPSSFSKAKKEAVKIYLDYPTSFYCGCDITWKNKKKGIPELESCGYQVRKQEKRASRIEWEHVVPAWQFGHQRQCWQKGGRKNCTRNDKQFKSMEADLHNLVPAIGEVNGDRSNFRFSQWNGSKGAFYGQCAFKVDFKGRVAEPPAQSRGAIARTYLYMNNEYKFNLSKAQRQLMEAWNKQYPVSTWECTRDERIAKIQGNHNQFVYKACGSSGEKIKGLNEYINLYNQKTKQKLPKFKPLYKQVLSDRESLSFYGEGYTSDEEVLEVFRNTLNKNSEIFSSIKKLEKLFKNFDEYSSAGIFVKNGPAISTISKDIFGEWNVIRDKWNAEYDDIHLKKKAVVTEKYEDDRRKSFKKIGSFSLEQLQEYADADLSVVEKLKEIIIQKVDEIYKVYGSSEKLFDADFVLEKSLKKNDAVVAIMKDLLDSVKSFENYIKAFFGEGKETNRDESFYGDFVLAYDILLKVDHIYDAIRNYVTQKPYSKDKFKLYFQNPQFMGGWDKDKETDYRATILRYGSKYYLAIMDKKYAKCLQKIDKDDVNGNYEKINYKLLPGPNKMLPKVFFSKKWMAYYNPSEDIQKIYKNGTFKKGDMFNLNDCHKLIDFFKDSISRYPKWSNAYDFNFSETEKYKDIAGFYREVEEQGYKVSFESASKKEVDKLVEEGKLYMFQIYNKDFSDKSHGTPNLHTMYFKLLFDENNHGQIRLSGGAELFMRRASLKKEELVVHPANSPIANKNPDNPKKTTTLSYDVYKDKRFSEDQYELHIPIAINKCPKNIFKINTEVRVLLKHDDNPYVIGIARGERNLLYIVVVDGKGNIVEQYSLNEIINNFNGIRIKTDYHSLLDKKEKERFEARQNWTSIENIKELKAGYISQVVHKICELVEKYDAVIALEDLNSGFKNSRVKVEKQVYQKFEKMLIDKLNYMVDKKSNPCATGGALKGYQITNKFESFKSMSTQNGFIFYIPAWLTSKIDPSTGFVNLLKTKYTSIADSKKFISSFDRIMYVPEEDLFEFALDYKNFSRTDADYIKKWKLYSYGNRIRIFRNPKKNNVFDWEEVCLTSAYKELFNKYGINYQQGDIRALLCEQSDKAFYSSFMALMSLMLQMRNSITGRTDVDFLISPVKNSDGIFYDSRNYEAQENAILPKNADANGAYNIARKVLWAIGQFKKAEDEKLDKVKIAISNKEWLEYAQTSVKH

SEQ ID NO: 304 - protein, 1304 aa, Synthetic construct
MSKLEKFTNCYSLSKTLRFKAIPVGKTQENIDNKRLLVEDEKRAEDYKGVKKLLDRYYLSFINDVLHSIKLKNLNNYISLFRKKTRTEKENKELENLEINLRKEIAKAFKGNEGYKSLFKKDIIETILPEFLDDKDEIALVNSFNGFTTAFTGFFDNRENMFSEEAKSTSIAFRCINENLTRYISNMDIFEKVDAIFDKHEVQEIKEKILNSDYDVEDFFEGEFFNFVLTQEGIDVYNAIIGGFVTESGGSSGRLREQALMRDKGLCLHCKNNRKIKVADMVDHIIPIKVDPSLKLKLENLQSLCNPCHNRKTAEDKKKYGGSSGEKIKGLNEYINLYNQKTKQKLPKFKPLYKQVLSDRESLSFYGEGYTSDEEVLEVFRNTLNKNSEIFSSIKKLEKLFKNFDEYSSAGIFVKNGPAISTISKDIFGEWNVIRDKWNAEYDDIHLKKKAVVTEKYEDDRRKSFKKIGSFSLEQLQEYADADLSVVEKLKEIIIQKVDEIYKVYGSSEKLFDADFVLEKSLKKNDAVVAIMKDLLDSVKSFENYIKAFFGEGKETNRDESFYGDFVLAYDILLKVDHIYDAIRNYVTQKPYSKDKFKLYFQNPQFMGGWDKDKETDYRATILRYGSKYYLAIMDKKYAKCLQKIDKDDVNGNYEKINYKLLPGPNKMLPKVFFSKKWMAYYNPSEDIQKIYKNGTFKKGDMFNLNDCHKLIDFFKDSISRYPKWSNAYDFNFSETEKYKDIAGFYREVEEQGYKVSFESASKKEVDKLVEEGKLYMFQIYNKDFSDKSHGTPNLHTMYFKLLFDENNHGQIRLSGGAELFMRRASLKKEELVVHPANSPIANKNPDNPKKTTTLSYDVYKDKRFSEDQYELHIPIAINKCPKNIFKINTEVRVLLKHDDNPYVIGIARGERNLLYIVVVDGKGNIVEQYSLNEIINNFNGIRIKTDYHSLLDKKEKERFEARQNWTSIENIKELKAGYISQVVHKICELVEKYDAVIALEDLNSGFKNSRVKVEKQVYQKFEKMLIDKLNYMVDKKSNPCATGGALKGYQITNKFESFKSMSTQNGFIFYIPAWLTSKIDPSTGFVNLLKTKYTSIADSKKFISSFDRIMYVPEEDLFEFALDYKNFSRTDADYIKKWKLYSYGNRIRIFRNPKKNNVFDWEEVCLTSAYKELFNKYGINYQQGDIRALLCEQSDKAFYSSFMALMSLMLQMRNSITGRTDVDFLISPVKNSDGIFYDSRNYEAQENAILPKNADANGAYNIARKVLWAIGQFKKAEDEKLDKVKIAISNKEWLEYAQTSVKH

SEQ ID NO: 305 - protein, 1356 aa, Synthetic construct
MSKLEKFTNCYSLSKTLRFKAIPVGKTQENIDNKRLLVEDEKRAEDYKGVKKLLDRYYLSFINDVLHSIKLKNLNNYISLFRKKTRTEKENKELENLEINLRKEIAKAFKGNEGYKSLFKKDIIETILPEFLDDKDEIALVNSFNGFTTAFTGFFDNRENMFSEEAKSTSIAFRCINENLTRYISNMDIFEKVDAIFDKHEVQEIKEKILNSDYDVEDFFEGEFFNFVLTQEGIDVYNAIIGGFVTESGGSSGSNNSYLRAKVFETEHGVCQLCNVNAQELFLRLRDAPKSQRKNLLYATWTSKLPLEQLNEMIRNPGEGHFWQVDHIKPVYGGGGQCSLDNLQTLCTVCHKERTARQAKERSQVRRQSLASKGSSGEKIKGLNEYINLYNQKTKQKLPKFKPLYKQVLSDRESLSFYGEGYTSDEEVLEVFRNTLNKNSEIFSSIKKLEKLFKNFDEYSSAGIFVKNGPAISTISKDIFGEWNVIRDKWNAEYDDIHLKKKAVVTEKYEDDRRKSFKKIGSFSLEQLQEYADADLSVVEKLKEIIIQKVDEIYKVYGSSEKLFDADFVLEKSLKKNDAVVAIMKDLLDSVKSFENYIKAFFGEGKETNRDESFYGDFVLAYDILLKVDHIYDAIRNYVTQKPYSKDKFKLYFQNPQFMGGWDKDKETDYRATILRYGSKYYLAIMDKKYAKCLQKIDKDDVNGNYEKINYKLLPGPNKMLPKVFFSKKWMAYYNPSEDIQKIYKNGTFKKGDMFNLNDCHKLIDFFKDSISRYPKWSNAYDFNFSETEKYKDIAGFYREVEEQGYKVSFESASKKEVDKLVEEGKLYMFQIYNKDFSDKSHGTPNLHTMYFKLLFDENNHGQIRLSGGAELFMRRASLKKEELVVHPANSPIANKNPDNPKKTTTLSYDVYKDKRFSEDQYELHIPIAINKCPKNIFKINTEVRVLLKHDDNPYVIGIARGERNLLYIVVVDGKGNIVEQYSLNEIINNFNGIRIKTDYHSLLDKKEKERFEARQNWTSIENIKELKAGYISQVVHKICELVEKYDAVIALEDLNSGFKNSRVKVEKQVYQKFEKMLIDKLNYMVDKKSNPCATGGALKGYQITNKFESFKSMSTQNGFIFYIPAWLTSKIDPSTGFVNLLKTKYTSIADSKKFISSFDRIMYVPEEDLFEFALDYKNFSRTDADYIKKWKLYSYGNRIRIFRNPKKNNVFDWEEVCLTSAYKELFNKYGINYQQGDIRALLCEQSDKAFYSSFMALMSLMLQMRNSITGRTDVDFLISPVKNSDGIFYDSRNYEAQENAILPKNADANGAYNIARKVLWAIGQFKKAEDEKLDKVKIAISNKEWLEYAQTSVKH

SEQ ID NO: 306 - protein, 1403 aa, Synthetic construct
MSKLEKFTNCYSLSKTLRFKAIPVGKTQENIDNKRLLVEDEKRAEDYKGVKKLLDRYYLSFINDVLHSIKLKNLNNYISLFRKKTRTEKENKELENLEINLRKEIAKAFKGNEGYKSLFKKDIIETILPEFLDDKDEIALVNSFNGFTTAFTGFFDNRENMFSEEAKSTSIAFRCINENLTRYISNMDIFEKVDAIFDKHEVQEIKEKILNSDYDVEDFFEGEFFNFVLTQEGIDVYNAIIGGFVTESGGSSGVREGFVTEKRAREMDGDMRRRAARNAKLFQEMQEKLNVQGKPSRADLWRYQSVQRQNCQCAYCGSPITFSNSEMDHIVPRAGQGSTNTRENLVAVCHRCNQSKGNTPFAIWAKNTSIEGVSVKEAVERTRHWVTDTGMRSTDFKKFTKAVVERFQRATMDEEIDARSGSSGEKIKGLNEYINLYNQKTKQKLPKFKPLYKQVLSDRESLSFYGEGYTSDEEVLEVFRNTLNKNSEIFSSIKKLEKLFKNFDEYSSAGIFVKNGPAISTISKDIFGEWNVIRDKWNAEYDDIHLKKKAVVTEKYEDDRRKSFKKIGSFSLEQLQEYADADLSVVEKLKEIIIQKVDEIYKVYGSSEKLFDADFVLEKSLKKNDAVVAIMKDLLDSVKSFENYIKAFFGEGKETNRDESFYGDFVLAYDILLKVDHIYDAIRNYVTQKPYSKDKFKLYFQNPQFMGGWDKDKETDYRATILRYGSKYYLAIMDKKYAKCLQKIDKDDVNGNYEKINYKLLPGPNKMLPKVFFSKKWMAYYNPSEDIQKIYKNGTFKKGDMFNLNDCHKLIDFFKDSISRYPKWSNAYDFNFSETEKYKDIAGFYREVEEQGYKVSFESASKKEVDKLVEEGKLYMFQIYNKDFSDKSHGTPNLHTMYFKLLFDENNHGQIRLSGGAELFMRRASLKKEELVVHPANSPIANKNPDNPKKTTTLSYDVYKDKRFSEDQYELHIPIAINKCPKNIFKINTEVRVLLKHDDNPYVIGIARGERNLLYIVVVDGKGNIVEQYSLNEIINNFNGIRIKTDYHSLLDKKEKERFEARQNWTSIENIKELKAGYISQVVHKICELVEKYDAVIALEDLNSGFKNSRVKVEKQVYQKFEKMLIDKLNYMVDKKSNPCATGGALKGYQITNKFESFKSMSTQNGFIFYIPAWLTSKIDPSTGFVNLLKTKYTSIADSKKFISSFDRIMYVPEEDLFEFALDYKNFSRTDADYIKKWKLYSYGNRIRIFRNPKKNNVFDWEEVCLTSAYKELFNKYGINYQQGDIRALLCEQSDKAFYSSFMALMSLMLQMRNSITGRTDVDFLISPVKNSDGIFYDSRNYEAQENAILPKNADANGAYNIARKVLWAIGQFKKAEDEKLDKVKIAISNKEWLEYAQTSVKH

SEQ ID NO: 307 - protein, 1380 aa, Synthetic construct
MSKLEKFTNCYSLSKTLRFKAIPVGKTQENIDNKRLLVEDEKRAEDYKGVKKLLDRYYLSFINDVLHSIKLKNLNNYISLFRKKTRTEKENKELENLEINLRKEIAKAFKGNEGYKSLFKKDIIETILPEFLDDKDEIALVNSFNGFTTAFTGFFDNRENMFSEEAKSTSIAFRCINENLTRYISNMDIFEKVDAIFDKHEVQEIKEKILNSDYDVEDFFEGEFFNFVLTQEGIDVYNAIIGGFVTESGGSSGENQFTNQGRRNSQQRLKGLTDSIKEFGSQILKEHPVENSQLQNDRLFLYYLQNGRDMYTGEELDIDYLSQYDIDHIIPQAFIKDNSIDNRVLTSSKENRGKSDDVPSKDVVRKMKSYWSKLLSAKLITQRKFDNLTKAERGGLTGSSGEKIKGLNEYINLYNQKTKQKLPKFKPLYKQVLSDRESLSFYGEGYTSDEEVLEVFRNTLNKNSEIFSSIKKLEKLFKNFDEYSSAGIFVKNGPAISTISKDIFGEWNVIRDKWNAEYDDIHLKKKAVVTEKYEDDRRKSFKKIGSFSLEQLQEYADADLSVVEKLKEIIIQKVDEIYKVYGSSEKLFDADFVLEKSLKKNDAVVAIMKDLLDSVKSFENYIKAFFGEGKETNRDESFYGDFVLAYDILLKVDHIYDAIRNYVTQKPYSKDKFKLYFQNPQFMGGWDKDKETDYRATILRYGSKYYLAIMDKKYAKCLQKIDKDDVNGNYEKINYKLLPGPNKMLPKVFFSKKWMAYYNPSEDIQKIYKNGTFKKGDMFNLNDCHKLIDFFKDSISRYPKWSNAYDFNFSETEKYKDIAGFYREVEEQGYKVSFESASKKEVDKLVEEGKLYMFQIYNKDFSDKSHGTPNLHTMYFKLLFDENNHGQIRLSGGAELFMRRASLKKEELVVHPANSPIANKNPDNPKKTTTLSYDVYKDKRFSEDQYELHIPIAINKCPKNIFKINTEVRVLLKHDDNPYVIGIARGERNLLYIVVVDGKGNIVEQYSLNEIINNFNGIRIKTDYHSLLDKKEKERFEARQNWTSIENIKELKAGYISQVVHKICELVEKYDAVIALEDLNSGFKNSRVKVEKQVYQKFEKMLIDKLNYMVDKKSNPCATGGALKGYQITNKFESFKSMSTQNGFIFYIPAWLTSKIDPSTGFVNLLKTKYTSIADSKKFISSFDRIMYVPEEDLFEFALDYKNFSRTDADYIKKWKLYSYGNRIRIFRNPKKNNVFDWEEVCLTSAYKELFNKYGINYQQGDIRALLCEQSDKAFYSSFMALMSLMLQMRNSITGRTDVDFLISPVKNSDGIFYDSRNYEAQENAILPKNADANGAYNIARKVLWAIGQFKKAEDEKLDKVKIAISNKEWLEYAQTSVKH

SEQ ID NO: 308 - protein, 1459 aa, Synthetic construct
MSKLEKFTNCYSLSKTLRFKAIPVGKTQENIDNKRLLVEDEKRAEDYKGVKKLLDRYYLSFINDVLHSIKLKNLNNYISLFRKKTRTEKENKELENLEINLRKEIAKAFKGNEGYKSLFKKDIIETILPEFLDDKDEIALVNSFNGFTTAFTGFFDNRENMFSEEAKSTSIAFRCINENLTRYISNMDIFEKVDAIFDKHEVQEIKEKILNSDYDVEDFFEGEFFNFVLTQEGIDVYNAIIGGFVTESGGSSGARVRTYPNVSHANTHYKNTVSSKLLPFTANYQLQLGELDNLNRATFSHIQLQDRHETKDVRTKINYDPVGWHNYQFPYGDGSKSSWVMNRGHLVGYQFCGLNDEPRNLVAMTAWLNTGAYSGANDSNPEGMLYYENRLDSWLALHPDFWLDYKVTPIYSGNEVVPRQIELQYVGIDSSGELLTIRLNSNKESIDENGVTTVILENSAPNINLDYLNGTATPKNGSSGEKIKGLNEYINLYNQKTKQKLPKFKPLYKQVLSDRESLSFYGEGYTSDEEVLEVFRNTLNKNSEIFSSIKKLEKLFKNFDEYSSAGIFVKNGPAISTISKDIFGEWNVIRDKWNAEYDDIHLKKKAVVTEKYEDDRRKSFKKIGSFSLEQLQEYADADLSVVEKLKEIIIQKVDEIYKVYGSSEKLFDADFVLEKSLKKNDAVVAIMKDLLDSVKSFENYIKAFFGEGKETNRDESFYGDFVLAYDILLKVDHIYDAIRNYVTQKPYSKDKFKLYFQNPQFMGGWDKDKETDYRATILRYGSKYYLAIMDKKYAKCLQKIDKDDVNGNYEKINYKLLPGPNKMLPKVFFSKKWMAYYNPSEDIQKIYKNGTFKKGDMFNLNDCHKLIDFFKDSISRYPKWSNAYDFNFSETEKYKDIAGFYREVEEQGYKVSFESASKKEVDKLVEEGKLYMFQIYNKDFSDKSHGTPNLHTMYFKLLFDENNHGQIRLSGGAELFMRRASLKKEELVVHPANSPIANKNPDNPKKTTTLSYDVYKDKRFSEDQYELHIPIAINKCPKNIFKINTEVRVLLKHDDNPYVIGIARGERNLLYIVVVDGKGNIVEQYSLNEIINNFNGIRIKTDYHSLLDKKEKERFEARQNWTSIENIKELKAGYISQVVHKICELVEKYDAVIALEDLNSGFKNSRVKVEKQVYQKFEKMLIDKLNYMVDKKSNPCATGGALKGYQITNKFESFKSMSTQNGFIFYIPAWLTSKIDPSTGFVNLLKTKYTSIADSKKFISSFDRIMYVPEEDLFEFALDYKNFSRTDADYIKKWKLYSYGNRIRIFRNPKKNNVFDWEEVCLTSAYKELFNKYGINYQQGDIRALLCEQSDKAFYSSFMALMSLMLQMRNSITGRTDVDFLISPVKNSDGIFYDSRNYEAQENAILPKNADANGAYNIARKVLWAIGQFKKAEDEKLDKVKIAISNKEWLEYAQTSVKH

SEQ ID NO: 309 - protein, 1506 aa, Synthetic construct
MSKLEKFTNCYSLSKTLRFKAIPVGKTQENIDNKRLLVEDEKRAEDYKGVKKLLDRYYLSFINDVLHSIKLKNLNNYISLFRKKTRTEKENKELENLEINLRKEIAKAFKGNEGYKSLFKKDIIETILPEFLDDKDEIALVNSFNGFTTAFTGFFDNRENMFSEEAKSTSIAFRCINENLTRYISNMDIFEKVDAIFDKHEVQEIKEKILNSDYDVEDFFEGEFFNFVLTQEGIDVYNAIIGGFVTESGGSSGAAPNIHGWGKEGHEIICKIAQTRLDETAAKAVKELLPESAEGDLSSLCLWADRVKFRYHWSSPLHYINTPDACSYQYNRDCKDESGEKGRCVAGAIYNYTTQLLSYKTAASSQSQYNLTEALLFVSHFMGDIHQPLHVSYASDKGGNTIEVHWYTRKANLHHIWDSNIIETAEADLYNSALEGMVDALKKNITTEWADQVKRWETCTKKTACPDIYASEGIQAACDWAYKGVTEGDTLEDEYFYSRLPIVYQRLAQGGVRLAATLNRIFGGSSGEKIKGLNEYINLYNQKTKQKLPKFKPLYKQVLSDRESLSFYGEGYTSDEEVLEVFRNTLNKNSEIFSSIKKLEKLFKNFDEYSSAGIFVKNGPAISTISKDIFGEWNVIRDKWNAEYDDIHLKKKAVVTEKYEDDRRKSFKKIGSFSLEQLQEYADADLSVVEKLKEIIIQKVDEIYKVYGSSEKLFDADFVLEKSLKKNDAVVAIMKDLLDSVKSFENYIKAFFGEGKETNRDESFYGDFVLAYDILLKVDHIYDAIRNYVTQKPYSKDKFKLYFQNPQFMGGWDKDKETDYRATILRYGSKYYLAIMDKKYAKCLQKIDKDDVNGNYEKINYKLLPGPNKMLPKVFFSKKWMAYYNPSEDIQKIYKNGTFKKGDMFNLNDCHKLIDFFKDSISRYPKWSNAYDFNFSETEKYKDIAGFYREVEEQGYKVSFESASKKEVDKLVEEGKLYMFQIYNKDFSDKSHGTPNLHTMYFKLLFDENNHGQIRLSGGAELFMRRASLKKEELVVHPANSPIANKNPDNPKKTTTLSYDVYKDKRFSEDQYELHIPIAINKCPKNIFKINTEVRVLLKHDDNPYVIGIARGERNLLYIVVVDGKGNIVEQYSLNEIINNFNGIRIKTDYHSLLDKKEKERFEARQNWTSIENIKELKAGYISQVVHKICELVEKYDAVIALEDLNSGFKNSRVKVEKQVYQKFEKMLIDKLNYMVDKKSNPCATGGALKGYQITNKFESFKSMSTQNGFIFYIPAWLTSKIDPSTGFVNLLKTKYTSIADSKKFISSFDRIMYVPEEDLFEFALDYKNFSRTDADYIKKWKLYSYGNRIRIFRNPKKNNVFDWEEVCLTSAYKELFNKYGINYQQGDIRALLCEQSDKAFYSSFMALMSLMLQMRNSITGRTDVDFLISPVKNSDGIFYDSRNYEAQENAILPKNADANGAYNIARKVLWAIGQFKKAEDEKLDKVKIAISNKEWLEYAQTSVKH

SEQ ID NO: 310 - protein, 1320 aa, Synthetic construct
MSKLEKFTNCYSLSKTLRFKAIPVGKTQENIDNKRLLVEDEKRAEDYKGVKKLLDRYYLSFINDVLHSIKLKNLNNYISLFRKKTRTEKENKELENLEINLRKEIAKAFKGNEGYKSLFKKDIIETILPEFLDDKDEIALVNSFNGFTTAFTGFFDNRENMFSEEAKSTSIAFRCINENLTRYISNMDIFEKVDAIFDKHEVQEIKEKILNSDYDVEDFFEGEFFNFVLTQEGIDVYNAIIGGFVTESGGSSGIDGVKLSSTEKKKMDEIAPPKGSVFTCPICEKRSIVGVTANLVHDHNHDTGWGREWICDSCNTGLGRFKDNPKFLEKVIEYLKKGSSGEKIKGLNEYINLYNQKTKQKLPKFKPLYKQVLSDRESLSFYGEGYTSDEEVLEVFRNTLNKNSEIFSSIKKLEKLFKNFDEYSSAGIFVKNGPAISTISKDIFGEWNVIRDKWNAEYDDIHLKKKAVVTEKYEDDRRKSFKKIGSFSLEQLQEYADADLSVVEKLKEIIIQKVDEIYKVYGSSEKLFDADFVLEKSLKKNDAVVAIMKDLLDSVKSFENYIKAFFGEGKETNRDESFYGDFVLAYDILLKVDHIYDAIRNYVTQKPYSKDKFKLYFQNPQFMGGWDKDKETDYRATILRYGSKYYLAIMDKKYAKCLQKIDKDDVNGNYEKINYKLLPGPNKMLPKVFFSKKWMAYYNPSEDIQKIYKNGTFKKGDMFNLNDCHKLIDFFKDSISRYPKWSNAYDFNFSETEKYKDIAGFYREVEEQGYKVSFESASKKEVDKLVEEGKLYMFQIYNKDFSDKSHGTPNLHTMYFKLLFDENNHGQIRLSGGAELFMRRASLKKEELVVHPANSPIANKNPDNPKKTTTLSYDVYKDKRFSEDQYELHIPIAINKCPKNIFKINTEVRVLLKHDDNPYVIGIARGERNLLYIVVVDGKGNIVEQYSLNEIINNFNGIRIKTDYHSLLDKKEKERFEARQNWTSIENIKELKAGYISQVVHKICELVEKYDAVIALEDLNSGFKNSRVKVEKQVYQKFEKMLIDKLNYMVDKKSNPCATGGALKGYQITNKFESFKSMSTQNGFIFYIPAWLTSKIDPSTGFVNLLKTKYTSIADSKKFISSFDRIMYVPEEDLFEFALDYKNFSRTDADYIKKWKLYSYGNRIRIFRNPKKNNVFDWEEVCLTSAYKELFNKYGINYQQGDIRALLCEQSDKAFYSSFMALMSLMLQMRNSITGRTDVDFLISPVKNSDGIFYDSRNYEAQENAILPKNADANGAYNIARKVLWAIGQFKKAEDEKLDKVKIAISNKEWLEYAQTSVKH

SEQ ID NO: 311 - protein, 1333 aa, Synthetic construct
MSKLEKFTNCYSLSKTLRFKAIPVGKTQENIDNKRLLVEDEKRAEDYKGVKKLLDRYYLSFINDVLHSIKLKNLNNYISLFRKKTRTEKENKELENLEINLRKEIAKAFKGNEGYKSLFKKDIIETILPEFLDDKDEIALVNSFNGFTTAFTGFFDNRENMFSEEAKSTSIAFRCINENLTRYISNMDIFEKVDAIFDKHEVQEIKEKILNSDYDVEDFFEGEFFNFVLTQEGIDVYNAIIGGFVTESGGSSGMNYFIVEVSEQEVKREKEKARELRRSQWWKNRIARGICHYCGEIFPPEELTMDHLVPVVRGGKSTRGNVVPACKECNNRKKYLLPVEWEEYLDSLESGSSGEKIKGLNEYINLYNQKTKQKLPKFKPLYKQVLSDRESLSFYGEGYTSDEEVLEVFRNTLNKNSEIFSSIKKLEKLFKNFDEYSSAGIFVKNGPAISTISKDIFGEWNVIRDKWNAEYDDIHLKKKAVVTEKYEDDRRKSFKKIGSFSLEQLQEYADADLSVVEKLKEIIIQKVDEIYKVYGSSEKLFDADFVLEKSLKKNDAVVAIMKDLLDSVKSFENYIKAFFGEGKETNRDESFYGDFVLAYDILLKVDHIYDAIRNYVTQKPYSKDKFKLYFQNPQFMGGWDKDKETDYRATILRYGSKYYLAIMDKKYAKCLQKIDKDDVNGNYEKINYKLLPGPNKMLPKVFFSKKWMAYYNPSEDIQKIYKNGTFKKGDMFNLNDCHKLIDFFKDSISRYPKWSNAYDFNFSETEKYKDIAGFYREVEEQGYKVSFESASKKEVDKLVEEGKLYMFQIYNKDFSDKSHGTPNLHTMYFKLLFDENNHGQIRLSGGAELFMRRASLKKEELVVHPANSPIANKNPDNPKKTTTLSYDVYKDKRFSEDQYELHIPIAINKCPKNIFKINTEVRVLLKHDDNPYVIGIARGERNLLYIVVVDGKGNIVEQYSLNEIINNFNGIRIKTDYHSLLDKKEKERFEARQNWTSIENIKELKAGYISQVVHKICELVEKYDAVIALEDLNSGFKNSRVKVEKQVYQKFEKMLIDKLNYMVDKKSNPCATGGALKGYQITNKFESFKSMSTQNGFIFYIPAWLTSKIDPSTGFVNLLKTKYTSIADSKKFISSFDRIMYVPEEDLFEFALDYKNFSRTDADYIKKWKLYSYGNRIRIFRNPKKNNVFDWEEVCLTSAYKELFNKYGINYQQGDIRALLCEQSDKAFYSSFMALMSLMLQMRNSITGRTDVDFLISPVKNSDGIFYDSRNYEAQENAILPKNADANGAYNIARKVLWAIGQFKKAEDEKLDKVKIAISNKEWLEYAQTSVKH

SEQ ID NO: 312 - protein, 1496 aa, Synthetic construct
MSKLEKFTNCYSLSKTLRFKAIPVGKTQENIDNKRLLVEDEKRAEDYKGVKKLLDRYYLSFINDVLHSIKLKNLNNYISLFRKKTRTEKENKELENLEINLRKEIAKAFKGNEGYKSLFKKDIIETILPEFLDDKDEIALVNSFNGFTTAFTGFFDNRENMFSEEAKSTSIAFRCINENLTRYISNMDIFEKVDAIFDKHEVQEIKEKILNSDYDVEDFFEGEFFNFVLTQEGIDVYNAIIGGFVTESGGSSGGKAQLDIKNFPELYRTTERVYKKSGQSTKPVTVSNIHYSVLDGYGRSGEAYGIITKDMIDMSAGYREKWESKPEPSGWYSYFFKNTNQRATESDYKHSPKNVSKISNNIKASILLSNGNVRNGYLFDRSHLIADSLGGRPFRNNLITGTRTQNVGNNDRKGGMQYIENKVLDHIKRNPKVHVYYKATPVYQGSELLPRAVLVSALSSDGFIDETVRVFNNVAGFNIDYQNGGLLSSTADVDINNVEENEIETTDDEIEEGGSSGEKIKGLNEYINLYNQKTKQKLPKFKPLYKQVLSDRESLSFYGEGYTSDEEVLEVFRNTLNKNSEIFSSIKKLEKLFKNFDEYSSAGIFVKNGPAISTISKDIFGEWNVIRDKWNAEYDDIHLKKKAVVTEKYEDDRRKSFKKIGSFSLEQLQEYADADLSVVEKLKEIIIQKVDEIYKVYGSSEKLFDADFVLEKSLKKNDAVVAIMKDLLDSVKSFENYIKAFFGEGKETNRDESFYGDFVLAYDILLKVDHIYDAIRNYVTQKPYSKDKFKLYFQNPQFMGGWDKDKETDYRATILRYGSKYYLAIMDKKYAKCLQKIDKDDVNGNYEKINYKLLPGPNKMLPKVFFSKKWMAYYNPSEDIQKIYKNGTFKKGDMFNLNDCHKLIDFFKDSISRYPKWSNAYDFNFSETEKYKDIAGFYREVEEQGYKVSFESASKKEVDKLVEEGKLYMFQIYNKDFSDKSHGTPNLHTMYFKLLFDENNHGQIRLSGGAELFMRRASLKKEELVVHPANSPIANKNPDNPKKTTTLSYDVYKDKRFSEDQYELHIPIAINKCPKNIFKINTEVRVLLKHDDNPYVIGIARGERNLLYIVVVDGKGNIVEQYSLNEIINNFNGIRIKTDYHSLLDKKEKERFEARQNWTSIENIKELKAGYISQVVHKICELVEKYDAVIALEDLNSGFKNSRVKVEKQVYQKFEKMLIDKLNYMVDKKSNPCATGGALKGYQITNKFESFKSMSTQNGFIFYIPAWLTSKIDPSTGFVNLLKTKYTSIADSKKFISSFDRIMYVPEEDLFEFALDYKNFSRTDADYIKKWKLYSYGNRIRIFRNPKKNNVFDWEEVCLTSAYKELFNKYGINYQQGDIRALLCEQSDKAFYSSFMALMSLMLQMRNSITGRTDVDFLISPVKNSDGIFYDSRNYEAQENAILPKNADANGAYNIARKVLWAIGQFKKAEDEKLDKVKIAISNKEWLEYAQTSVKH

SEQ ID NO: 313 - protein, 1380 aa, Synthetic construct
MSKLEKFTNCYSLSKTLRFKAIPVGKTQENIDNKRLLVEDEKRAEDYKGVKKLLDRYYLSFINDVLHSIKLKNLNNYISLFRKKTRTEKENKELENLEINLRKEIAKAFKGNEGYKSLFKKDIIETILPEFLDDKDEIALVNSFNGFTTAFTGFFDNRENMFSEEAKSTSIAFRCINENLTRYISNMDIFEKVDAIFDKHEVQEIKEKILNSDYDVEDFFEGEFFNFVLTQEGIDVYNAIIGGFVTESGGSSGENQTTGKGKNNSRPRYKSLEKAIKEFGSQILKEHPTDNQELRNNRLYLYYLQNGKDMYTGQDLDIHNLSNYDIDHIVPQSFITDNSIDNLVLTSSAGNREKGDDVPPLEIVRKRKVFWEKLYQGNLMSKRKFDYLTKAERGGLTGSSGEKIKGLNEYINLYNQKTKQKLPKFKPLYKQVLSDRESLSFYGEGYTSDEEVLEVFRNTLNKNSEIFSSIKKLEKLFKNFDEYSSAGIFVKNGPAISTISKDIFGEWNVIRDKWNAEYDDIHLKKKAVVTEKYEDDRRKSFKKIGSFSLEQLQEYADADLSVVEKLKEIIIQKVDEIYKVYGSSEKLFDADFVLEKSLKKNDAVVAIMKDLLDSVKSFENYIKAFFGEGKETNRDESFYGDFVLAYDILLKVDHIYDAIRNYVTQKPYSKDKFKLYFQNPQFMGGWDKDKETDYRATILRYGSKYYLAIMDKKYAKCLQKIDKDDVNGNYEKINYKLLPGPNKMLPKVFFSKKWMAYYNPSEDIQKIYKNGTFKKGDMFNLNDCHKLIDFFKDSISRYPKWSNAYDFNFSETEKYKDIAGFYREVEEQGYKVSFESASKKEVDKLVEEGKLYMFQIYNKDFSDKSHGTPNLHTMYFKLLFDENNHGQIRLSGGAELFMRRASLKKEELVVHPANSPIANKNPDNPKKTTTLSYDVYKDKRFSEDQYELHIPIAINKCPKNIFKINTEVRVLLKHDDNPYVIGIARGERNLLYIVVVDGKGNIVEQYSLNEIINNFNGIRIKTDYHSLLDKKEKERFEARQNWTSIENIKELKAGYISQVVHKICELVEKYDAVIALEDLNSGFKNSRVKVEKQVYQKFEKMLIDKLNYMVDKKSNPCATGGALKGYQITNKFESFKSMSTQNGFIFYIPAWLTSKIDPSTGFVNLLKTKYTSIADSKKFISSFDRIMYVPEEDLFEFALDYKNFSRTDADYIKKWKLYSYGNRIRIFRNPKKNNVFDWEEVCLTSAYKELFNKYGINYQQGDIRALLCEQSDKAFYSSFMALMSLMLQMRNSITGRTDVDFLISPVKNSDGIFYDSRNYEAQENAILPKNADANGAYNIARKVLWAIGQFKKAEDEKLDKVKIAISNKEWLEYAQTSVKH

SEQ ID NO: 314 - protein, 1323 aa, Synthetic construct
MSKLEKFTNCYSLSKTLRFKAIPVGKTQENIDNKRLLVEDEKRAEDYKGVKKLLDRYYLSFINDVLHSIKLKNLNNYISLFRKKTRTEKENKELENLEINLRKEIAKAFKGNEGYKSLFKKDIIETILPEFLDDKDEIALVNSFNGFTTAFTGFFDNRENMFSEEAKSTSIAFRCINENLTRYISNMDIFEKVDAIFDKHEVQEIKEKILNSDYDVEDFFEGEFFNFVLTQEGIDVYNAIIGGFVTESGGSSGMELKNSISDYTEAEFVQLLKEIEKENVAATDDVLDVLLEHFVKITEHPDGTDLIYYPSDNRDDSPEGIVKEIKEWRAANGKPGFKQGGSSGEKIKGLNEYINLYNQKTKQKLPKFKPLYKQVLSDRESLSFYGEGYTSDEEVLEVFRNTLNKNSEIFSSIKKLEKLFKNFDEYSSAGIFVKNGPAISTISKDIFGEWNVIRDKWNAEYDDIHLKKKAVVTEKYEDDRRKSFKKIGSFSLEQLQEYADADLSVVEKLKEIIIQKVDEIYKVYGSSEKLFDADFVLEKSLKKNDAVVAIMKDLLDSVKSFENYIKAFFGEGKETNRDESFYGDFVLAYDILLKVDHIYDAIRNYVTQKPYSKDKFKLYFQNPQFMGGWDKDKETDYRATILRYGSKYYLAIMDKKYAKCLQKIDKDDVNGNYEKINYKLLPGPNKMLPKVFFSKKWMAYYNPSEDIQKIYKNGTFKKGDMFNLNDCHKLIDFFKDSISRYPKWSNAYDFNFSETEKYKDIAGFYREVEEQGYKVSFESASKKEVDKLVEEGKLYMFQIYNKDFSDKSHGTPNLHTMYFKLLFDENNHGQIRLSGGAELFMRRASLKKEELVVHPANSPIANKNPDNPKKTTTLSYDVYKDKRFSEDQYELHIPIAINKCPKNIFKINTEVRVLLKHDDNPYVIGIARGERNLLYIVVVDGKGNIVEQYSLNEIINNFNGIRIKTDYHSLLDKKEKERFEARQNWTSIENIKELKAGYISQVVHKICELVEKYDAVIALEDLNSGFKNSRVKVEKQVYQKFEKMLIDKLNYMVDKKSNPCATGGALKGYQITNKFESFKSMSTQNGFIFYIPAWLTSKIDPSTGFVNLLKTKYTSIADSKKFISSFDRIMYVPEEDLFEFALDYKNFSRTDADYIKKWKLYSYGNRIRIFRNPKKNNVFDWEEVCLTSAYKELFNKYGINYQQGDIRALLCEQSDKAFYSSFMALMSLMLQMRNSITGRTDVDFLISPVKNSDGIFYDSRNYEAQENAILPKNADANGAYNIARKVLWAIGQFKKAEDEKLDKVKIAISNKEWLEYAQTSVKH

SEQ ID NO: 315 - protein, 1323 aa, Synthetic construct
MSKLEKFTNCYSLSKTLRFKAIPVGKTQENIDNKRLLVEDEKRAEDYKGVKKLLDRYYLSFINDVLHSIKLKNLNNYISLFRKKTRTEKENKELENLEINLRKEIAKAFKGNEGYKSLFKKDIIETILPEFLDDKDEIALVNSFNGFTTAFTGFFDNRENMFSEEAKSTSIAFRCINENLTRYISNMDIFEKVDAIFDKHEVQEIKEKILNSDYDVEDFFEGEFFNFVLTQEGIDVYNAIIGGFVTESGGSSGMKSKISEYTEKEFLEFVKDIYTNNKKKFPTEESHIQAVLEFKKLTEHPSGSDLLYYPNENREDSPAGVVKEVKEWRASKGLPGFKAGGSSGEKIKGLNEYINLYNQKTKQKLPKFKPLYKQVLSDRESLSFYGEGYTSDEEVLEVFRNTLNKNSEIFSSIKKLEKLFKNFDEYSSAGIFVKNGPAISTISKDIFGEWNVIRDKWNAEYDDIHLKKKAVVTEKYEDDRRKSFKKIGSFSLEQLQEYADADLSVVEKLKEIIIQKVDEIYKVYGSSEKLFDADFVLEKSLKKNDAVVAIMKDLLDSVKSFENYIKAFFGEGKETNRDESFYGDFVLAYDILLKVDHIYDAIRNYVTQKPYSKDKFKLYFQNPQFMGGWDKDKETDYRATILRYGSKYYLAIMDKKYAKCLQKIDKDDVNGNYEKINYKLLPGPNKMLPKVFFSKKWMAYYNPSEDIQKIYKNGTFKKGDMFNLNDCHKLIDFFKDSISRYPKWSNAYDFNFSETEKYKDIAGFYREVEEQGYKVSFESASKKEVDKLVEEGKLYMFQIYNKDFSDKSHGTPNLHTMYFKLLFDENNHGQIRLSGGAELFMRRASLKKEELVVHPANSPIANKNPDNPKKTTTLSYDVYKDKRFSEDQYELHIPIAINKCPKNIFKINTEVRVLLKHDDNPYVIGIARGERNLLYIVVVDGKGNIVEQYSLNEIINNFNGIRIKTDYHSLLDKKEKERFEARQNWTSIENIKELKAGYISQVVHKICELVEKYDAVIALEDLNSGFKNSRVKVEKQVYQKFEKMLIDKLNYMVDKKSNPCATGGALKGYQITNKFESFKSMSTQNGFIFYIPAWLTSKIDPSTGFVNLLKTKYTSIADSKKFISSFDRIMYVPEEDLFEFALDYKNFSRTDADYIKKWKLYSYGNRIRIFRNPKKNNVFDWEEVCLTSAYKELFNKYGINYQQGDIRALLCEQSDKAFYSSFMALMSLMLQMRNSITGRTDVDFLISPVKNSDGIFYDSRNYEAQENAILPKNADANGAYNIARKVLWAIGQFKKAEDEKLDKVKIAISNKEWLEYAQTSVKH

SEQ ID NO: 316 - protein, 1511 aa, Synthetic construct
MSKLEKFTNCYSLSKTLRFKAIPVGKTQENIDNKRLLVEDEKRAEDYKGVKKLLDRYYLSFINDVLHSIKLKNLNNYISLFRKKTRTEKENKELENLEINLRKEIAKAFKGNEGYKSLFKKDIIETILPEFLDDKDEIALVNSFNGFTTAFTGFFDNRENMFSEEAKSTSIAFRCINENLTRYISNMDIFEKVDAIFDKHEVQEIKEKILNSDYDVEDFFEGEFFNFVLTQEGIDVYNAIIGGFVTESGGSSGWRRRREDARAAPGLLGRLPVLPVAAAAELPPVPGGPRGPGELAKYGLPGLAQLKSRESYVLCYDPRTRGALWVVEQLRPERLRGDGDRRECDFREDDSVHAYHRATNADYRGSGFDRGHLAAAANHRWSQKAMDDTFYLSNVAPQVPHLNQNAWNNLEKYSRSLTRSYQNVYVCTGPLFLPRTEADGKSYVKYQVIGKNHVAVPTHFFKVLILEAAGGQIELRTYVMPNAPVDEAIPLERFLVPIESIERASGLLFVPNILARAGSLKAITAGSKGSSGEKIKGLNEYINLYNQKTKQKLPKFKPLYKQVLSDRESLSFYGEGYTSDEEVLEVFRNTLNKNSEIFSSIKKLEKLFKNFDEYSSAGIFVKNGPAISTISKDIFGEWNVIRDKWNAEYDDIHLKKKAVVTEKYEDDRRKSFKKIGSFSLEQLQEYADADLSVVEKLKEIIIQKVDEIYKVYGSSEKLFDADFVLEKSLKKNDAVVAIMKDLLDSVKSFENYIKAFFGEGKETNRDESFYGDFVLAYDILLKVDHIYDAIRNYVTQKPYSKDKFKLYFQNPQFMGGWDKDKETDYRATILRYGSKYYLAIMDKKYAKCLQKIDKDDVNGNYEKINYKLLPGPNKMLPKVFFSKKWMAYYNPSEDIQKIYKNGTFKKGDMFNLNDCHKLIDFFKDSISRYPKWSNAYDFNFSETEKYKDIAGFYREVEEQGYKVSFESASKKEVDKLVEEGKLYMFQIYNKDFSDKSHGTPNLHTMYFKLLFDENNHGQIRLSGGAELFMRRASLKKEELVVHPANSPIANKNPDNPKKTTTLSYDVYKDKRFSEDQYELHIPIAINKCPKNIFKINTEVRVLLKHDDNPYVIGIARGERNLLYIVVVDGKGNIVEQYSLNEIINNFNGIRIKTDYHSLLDKKEKERFEARQNWTSIENIKELKAGYISQVVHKICELVEKYDAVIALEDLNSGFKNSRVKVEKQVYQKFEKMLIDKLNYMVDKKSNPCATGGALKGYQITNKFESFKSMSTQNGFIFYIPAWLTSKIDPSTGFVNLLKTKYTSIADSKKFISSFDRIMYVPEEDLFEFALDYKNFSRTDADYIKKWKLYSYGNRIRIFRNPKKNNVFDWEEVCLTSAYKELFNKYGINYQQGDIRALLCEQSDKAFYSSFMALMSLMLQMRNSITGRTDVDFLISPVKNSDGIFYDSRNYEAQENAILPKNADANGAYNIARKVLWAIGQFKKAEDEKLDKVKIAISNKEWLEYAQTSVKH

SEQ ID NO: 317 - protein, 1372 aa, Synthetic construct
MSKLEKFTNCYSLSKTLRFKAIPVGKTQENIDNKRLLVEDEKRAEDYKGVKKLLDRYYLSFINDVLHSIKLKNLNNYISLFRKKTRTEKENKELENLEINLRKEIAKAFKGNEGYKSLFKKDIIETILPEFLDDKDEIALVNSFNGFTTAFTGFFDNRENMFSEEAKSTSIAFRCINENLTRYISNMDIFEKVDAIFDKHEVQEIKEKILNSDYDVEDFFEGEFFNFVLTQEGIDVYNAIIGGFVTESGGSSGDEPGVATGNGQPVTGNWLAGASQGDGVPIPSQIADQLRGKEFKSWRDFREQFWMAVSKDPSALENLSPSNRYFVSQGLAPYAVPEEHLGSKEKFEIHHVVPLESGGALYNIDNLVIVTPKRHSEIHKELKLKRKEKGSSGEKIKGLNEYINLYNQKTKQKLPKFKPLYKQVLSDRESLSFYGEGYTSDEEVLEVFRNTLNKNSEIFSSIKKLEKLFKNFDEYSSAGIFVKNGPAISTISKDIFGEWNVIRDKWNAEYDDIHLKKKAVVTEKYEDDRRKSFKKIGSFSLEQLQEYADADLSVVEKLKEIIIQKVDEIYKVYGSSEKLFDADFVLEKSLKKNDAVVAIMKDLLDSVKSFENYIKAFFGEGKETNRDESFYGDFVLAYDILLKVDHIYDAIRNYVTQKPYSKDKFKLYFQNPQFMGGWDKDKETDYRATILRYGSKYYLAIMDKKYAKCLQKIDKDDVNGNYEKINYKLLPGPNKMLPKVFFSKKWMAYYNPSEDIQKIYKNGTFKKGDMFNLNDCHKLIDFFKDSISRYPKWSNAYDFNFSETEKYKDIAGFYREVEEQGYKVSFESASKKEVDKLVEEGKLYMFQIYNKDFSDKSHGTPNLHTMYFKLLFDENNHGQIRLSGGAELFMRRASLKKEELVVHPANSPIANKNPDNPKKTTTLSYDVYKDKRFSEDQYELHIPIAINKCPKNIFKINTEVRVLLKHDDNPYVIGIARGERNLLYIVVVDGKGNIVEQYSLNEIINNFNGIRIKTDYHSLLDKKEKERFEARQNWTSIENIKELKAGYISQVVHKICELVEKYDAVIALEDLNSGFKNSRVKVEKQVYQKFEKMLIDKLNYMVDKKSNPCATGGALKGYQITNKFESFKSMSTQNGFIFYIPAWLTSKIDPSTGFVNLLKTKYTSIADSKKFISSFDRIMYVPEEDLFEFALDYKNFSRTDADYIKKWKLYSYGNRIRIFRNPKKNNVFDWEEVCLTSAYKELFNKYGINYQQGDIRALLCEQSDKAFYSSFMALMSLMLQMRNSITGRTDVDFLISPVKNSDGIFYDSRNYEAQENAILPKNADANGAYNIARKVLWAIGQFKKAEDEKLDKVKIAISNKEWLEYAQTSVKH

SEQ ID NO: 318 - protein, 1787 aa, Synthetic construct
MKRTADGSEFESPKKKRKVSKLEKFTNCYSLSKTLRFKAIPVGKTQENIDNKRLLVEDEKRAEDYKGVKKLLDRYYLSFINDVLHSIKLKNLNNYISLFRKKTRTEKENKELENLEINLRKEIAKAFKGNEGYKSLFKKDIIETILPEFLDDKDEIALVNSFNGFTTAFTGFFDNRENMFSEEAKSTSIAFRCINENLTRYISNMDIFEKVDAIFDKHEVQEIKEKILNSDYDVEDFFEGEFFNFVLTQEGIDVYNAIIGGFVTESGEKIKGLNEYINLYNQKTKQKLPKFKPLYKQVLSDRESLSFYGEGSSGENQTTQKGQKNSRERMKRIEEGIKELGSQILKEHPVENTQLQNEKLYLYYLQNGRDMYVDQELDINRLSDYDVDHIVPQSFLKDDSIDNKVLTRSDKNRGKSDNVPSEEVVKKMKNYWRQLLNAKLITQRKFDNLTKAERGGLSGYTSDEEVLEVFRNTLNKNSEIFSSIKKLEKLFKNFDEYSSAGIFVKNGPAISTISKDIFGEWNVIRDKWNAEYDDIHLKKKAVVTEKYEDDRRKSFKKIGSFSLEQLQEYADADLSVVEKLKEIIIQKVDEIYKVYGSSEKLFDADFVLEKSLKKNDAVVAIMKDLLDSVKSFENYIKAFFGEGKETNRDESFYGDFVLAYDILLKVDHIYDAIRNYVTQKPYSKDKFKLYFQNPQFMGGWDKDKETDYRATILRYGSKYYLAIMDKKYAKCLQKIDKDDVNGNYEKINYKLLPGPNKMLPKVFFSKKWMAYYNPSEDIQKIYKNGTFKKGDMFNLNDCHKLIDFFKDSISRYPKWSNAYDFNFSETEKYKDIAGFYREVEEQGYKVSFESASKKEVDKLVEEGKLYMFQIYNKDFSDKSHGTPNLHTMYFKLLFDENNHGQIRLSGGAELFMRRASLKKEELVVHPANSPIANKNPDNPKKTTTLSYDVYKDKRFSEDQYELHIPIAINKCPKNIFKINTEVRVLLKHDDNPYVIGIARGERNLLYIVVVDGKGNIVEQYSLNEIINNFNGIRIKTDYHSLLDKKEKERFEARQNWTSIENIKELKAGYISQVVHKICELVEKYDAVIALEDLNSGFKNSRVKVEKQVYQKFEKMLIDKLNYMVDKKSNPCATGGALKGYQITNKFESFKSMSTQNGFIFYIPAWLTSKIDPSTGFVNLLKTKYTSIADSKKFISSFDRIMYVPEEDLFEFALDYKNFSRTDADYIKKWKLYSYGNRIRIFRNPKKNNVFDWEEVCLTSAYKELFNKYGINYQQGDIRALLCEQSDKAFYSSFMALMSLMLQMRNSITGRTDVDFLISPVKNSDGIFYDSRNYEAQENAILPKNADANGAYNIARKVLWAIGQFKKAEDEKLDKVKIAISNKEWLEYAQTSVKHGGGGSGGGGSGGGGSGPKKKRKVAAAGSEELLSKNYHLENEVARLKKGSGSGGSGSGGSGSGSGGSGSGGSGSGEELLSKNYHLENEVARLKKGSGSGGSGSGGSGSGSGGSGSGGSGSGEELLSKNYHLENEVARLKKGSGSGGSGSGGSGSGSGGSGSGGSGSGEELLSKNYHLENEVARLKKGSGSGGSGSGGSGSGSGGSGSGGSGSGEELLSKNYHLENEVARLKKGSGSGGSGSGGSGSGSGGSGSGGSGSGEELLSKNYHLENEVARLKKGSGSGGSGSGGSGSGSGGSGSGGSGSGEELLSKNYHLENEVARLKKGSGSGGSGSGGSGSGSGGSGSGGSGSGEELLSKNYHLENEVARLKKSGGSKRTADGSEFEPKKKRKVGSG

SEQ ID NO: 319 - protein, 1787 aa, Synthetic construct
MKRTADGSEFESPKKKRKVSKLEKFTNCYSLSKTLRFKAIPVGKTQENIDNKRLLVEDEKRAEDYKGVKKLLDRYYLSFINDVLHSIKLKNLNNYISLFRKKTRTEKENKELENLEINLRKEIAKAFKGNEGYKSLFKKDIIETILPEFLDDKDEIALVNSFNGFTTAFTGFFDNRENMFSEEAKSTSIAFRCINENLTRYISNMDIFEKVDAIFDKHEVQEIKEKILNSDYDVEDFFEGEFFNFVLTQEGIDVYNAIIGGFVTESGEKIKGLNEYINLYNQKTKQKLPKFKPLYKQVLSDRESLSFYGGSSGENQTTQKGQKNSRERMKRIEEGIKELGSQILKEHPVENTQLQNEKLYLYYLQNGRDMYVDQELDINRLSDYDVDHIVPQSFLKDDSIDNKVLTRSDKNRGKSDNVPSEEVVKKMKNYWRQLLNAKLITQRKFDNLTKAERGGLSEGYTSDEEVLEVFRNTLNKNSEIFSSIKKLEKLFKNFDEYSSAGIFVKNGPAISTISKDIFGEWNVIRDKWNAEYDDIHLKKKAVVTEKYEDDRRKSFKKIGSFSLEQLQEYADADLSVVEKLKEIIIQKVDEIYKVYGSSEKLFDADFVLEKSLKKNDAVVAIMKDLLDSVKSFENYIKAFFGEGKETNRDESFYGDFVLAYDILLKVDHIYDAIRNYVTQKPYSKDKFKLYFQNPQFMGGWDKDKETDYRATILRYGSKYYLAIMDKKYAKCLQKIDKDDVNGNYEKINYKLLPGPNKMLPKVFFSKKWMAYYNPSEDIQKIYKNGTFKKGDMFNLNDCHKLIDFFKDSISRYPKWSNAYDFNFSETEKYKDIAGFYREVEEQGYKVSFESASKKEVDKLVEEGKLYMFQIYNKDFSDKSHGTPNLHTMYFKLLFDENNHGQIRLSGGAELFMRRASLKKEELVVHPANSPIANKNPDNPKKTTTLSYDVYKDKRFSEDQYELHIPIAINKCPKNIFKINTEVRVLLKHDDNPYVIGIARGERNLLYIVVVDGKGNIVEQYSLNEIINNFNGIRIKTDYHSLLDKKEKERFEARQNWTSIENIKELKAGYISQVVHKICELVEKYDAVIALEDLNSGFKNSRVKVEKQVYQKFEKMLIDKLNYMVDKKSNPCATGGALKGYQITNKFESFKSMSTQNGFIFYIPAWLTSKIDPSTGFVNLLKTKYTSIADSKKFISSFDRIMYVPEEDLFEFALDYKNFSRTDADYIKKWKLYSYGNRIRIFRNPKKNNVFDWEEVCLTSAYKELFNKYGINYQQGDIRALLCEQSDKAFYSSFMALMSLMLQMRNSITGRTDVDFLISPVKNSDGIFYDSRNYEAQENAILPKNADANGAYNIARKVLWAIGQFKKAEDEKLDKVKIAISNKEWLEYAQTSVKHGGGGSGGGGSGGGGSGPKKKRKVAAAGSEELLSKNYHLENEVARLKKGSGSGGSGSGGSGSGSGGSGSGGSGSGEELLSKNYHLENEVARLKKGSGSGGSGSGGSGSGSGGSGSGGSGSGEELLSKNYHLENEVARLKKGSGSGGSGSGGSGSGSGGSGSGGSGSGEELLSKNYHLENEVARLKKGSGSGGSGSGGSGSGSGGSGSGGSGSGEELLSKNYHLENEVARLKKGSGSGGSGSGGSGSGSGGSGSGGSGSGEELLSKNYHLENEVARLKKGSGSGGSGSGGSGSGSGGSGSGGSGSGEELLSKNYHLENEVARLKKGSGSGGSGSGGSGSGSGGSGSGGSGSGEELLSKNYHLENEVARLKKSGGSKRTADGSEFEPKKKRKVGSG

SEQ ID NO: 320 - protein, 1789 aa, Synthetic construct
MKRTADGSEFESPKKKRKVSKLEKFTNCYSLSKTLRFKAIPVGKTQENIDNKRLLVEDEKRAEDYKGVKKLLDRYYLSFINDVLHSIKLKNLNNYISLFRKKTRTEKENKELENLEINLRKEIAKAFKGNEGYKSLFKKDIIETILPEFLDDKDEIALVNSFNGFTTAFTGFFDNRENMFSEEAKSTSIAFRCINENLTRYISNMDIFEKVDAIFDKHEVQEIKEKILNSDYDVEDFFEGEFFNFVLTQEGIDVYNAIIGGFVTESGEKIKGLNEYINLYNQKTKQKLPKFKPLYKQVLSDRESLSFYGGSSGENQTTQKGQKNSRERMKRIEEGIKELGSQILKEHPVENTQLQNEKLYLYYLQNGRDMYVDQELDINRLSDYDVDHIVPQSFLKDDSIDNKVLTRSDKNRGKSDNVPSEEVVKKMKNYWRQLLNAKLITQRKFDNLTKAERGGLSGSEGYTSDEEVLEVFRNTLNKNSEIFSSIKKLEKLFKNFDEYSSAGIFVKNGPAISTISKDIFGEWNVIRDKWNAEYDDIHLKKKAVVTEKYEDDRRKSFKKIGSFSLEQLQEYADADLSVVEKLKEIIIQKVDEIYKVYGSSEKLFDADFVLEKSLKKNDAVVAIMKDLLDSVKSFENYIKAFFGEGKETNRDESFYGDFVLAYDILLKVDHIYDAIRNYVTQKPYSKDKFKLYFQNPQFMGGWDKDKETDYRATILRYGSKYYLAIMDKKYAKCLQKIDKDDVNGNYEKINYKLLPGPNKMLPKVFFSKKWMAYYNPSEDIQKIYKNGTFKKGDMFNLNDCHKLIDFFKDSISRYPKWSNAYDFNFSETEKYKDIAGFYREVEEQGYKVSFESASKKEVDKLVEEGKLYMFQIYNKDFSDKSHGTPNLHTMYFKLLFDENNHGQIRLSGGAELFMRRASLKKEELVVHPANSPIANKNPDNPKKTTTLSYDVYKDKRFSEDQYELHIPIAINKCPKNIFKINTEVRVLLKHDDNPYVIGIARGERNLLYIVVVDGKGNIVEQYSLNEIINNFNGIRIKTDYHSLLDKKEKERFEARQNWTSIENIKELKAGYISQVVHKICELVEKYDAVIALEDLNSGFKNSRVKVEKQVYQKFEKMLIDKLNYMVDKKSNPCATGGALKGYQITNKFESFKSMSTQNGFIFYIPAWLTSKIDPSTGFVNLLKTKYTSIADSKKFISSFDRIMYVPEEDLFEFALDYKNFSRTDADYIKKWKLYSYGNRIRIFRNPKKNNVFDWEEVCLTSAYKELFNKYGINYQQGDIRALLCEQSDKAFYSSFMALMSLMLQMRNSITGRTDVDFLISPVKNSDGIFYDSRNYEAQENAILPKNADANGAYNIARKVLWAIGQFKKAEDEKLDKVKIAISNKEWLEYAQTSVKHGGGGSGGGGSGGGGSGPKKKRKVAAAGSEELLSKNYHLENEVARLKKGSGSGGSGSGGSGSGSGGSGSGGSGSGEELLSKNYHLENEVARLKKGSGSGGSGSGGSGSGSGGSGSGGSGSGEELLSKNYHLENEVARLKKGSGSGGSGSGGSGSGSGGSGSGGSGSGEELLSKNYHLENEVARLKKGSGSGGSGSGGSGSGSGGSGSGGSGSGEELLSKNYHLENEVARLKKGSGSGGSGSGGSGSGSGGSGSGGSGSGEELLSKNYHLENEVARLKKGSGSGGSGSGGSGSGSGGSGSGGSGSGEELLSKNYHLENEVARLKKGSGSGGSGSGGSGSGSGGSGSGGSGSGEELLSKNYHLENEVARLKKSGGSKRTADGSEFEPKKKRKVGSG

SEQ ID NO: 321 - protein, 1739 aa, Synthetic construct
MKRTADGSEFESPKKKRKVEASPASGPRHLMDPHIFTSNFNNGIGRHKTYLCYEVERLDNGTSVKMDQHRGFLHNQAKNLLCGFYGRHAELRFLDLVPSLQLDPAQIYRVTWFISWSPCFSWGCAGEVRAFLQENTHVRLRIFAARIYDYDPLYKEALQMLRDAGAQVSIMTYDEFKHCWDTFVDHQGCPFQPWDGLDEHSQALSGRLRAILQNQGNSTSQSDGSSVPADIDQSSDSDQSSSQGQPGSKLEKFTNCYSLSKTLRFKAIPVGKTQENIDNKRLLVEDEKRAEDYKGVKKLLDRYYLSFINDVLHSIKLKNLNNYISLFRKKTRTEKENKELENLEINLRKEIAKAFKGNEGYKSLFKKDIIETILPEFLDDKDEIALVNSFNGFTTAFTGFFDNRENMFSEEAKSTSIAFRCINENLTRYISNMDIFEKVDAIFDKHEVQEIKEKILNSDYDVEDFFEGEFFNFVLTQEGIDVYNAIIGGFVTESGEKIKGLNEYINLYNQKTKQKLPKFKPLYKQVLSDRESLSFYGEGSSGENQTTQKGQKNSRERMKRIEEGIKELGSQILKEHPVENTQLQNEKLYLYYLQNGRDMYVDQELDINRLSDYDVDHIVPQSFLKDDSIDNKVLTRSDKNRGKSDNVPSEEVVKKMKNYWRQLLNAKLITQRKFDNLTKAERGGLSGYTSDEEVLEVFRNTLNKNSEIFSSIKKLEKLFKNFDEYSSAGIFVKNGPAISTISKDIFGEWNVIRDKWNAEYDDIHLKKKAVVTEKYEDDRRKSFKKIGSFSLEQLQEYADADLSVVEKLKEIIIQKVDEIYKVYGSSEKLFDADFVLEKSLKKNDAVVAIMKDLLDSVKSFENYIKAFFGEGKETNRDESFYGDFVLAYDILLKVDHIYDAIRNYVTQKPYSKDKFKLYFQNPQFMGGWDKDKETDYRATILRYGSKYYLAIMDKKYAKCLQKIDKDDVNGNYEKINYKLLPGPNKMLPKVFFSKKWMAYYNPSEDIQKIYKNGTFKKGDMFNLNDCHKLIDFFKDSISRYPKWSNAYDFNFSETEKYKDIAGFYREVEEQGYKVSFESASKKEVDKLVEEGKLYMFQIYNKDFSDKSHGTPNLHTMYFKLLFDENNHGQIRLSGGAELFMRRASLKKEELVVHPANSPIANKNPDNPKKTTTLSYDVYKDKRFSEDQYELHIPIAINKCPKNIFKINTEVRVLLKHDDNPYVIGIARGERNLLYIVVVDGKGNIVEQYSLNEIINNFNGIRIKTDYHSLLDKKEKERFEARQNWTSIENIKELKAGYISQVVHKICELVEKYDAVIALEDLNSGFKNSRVKVEKQVYQKFEKMLIDKLNYMVDKKSNPCATGGALKGYQITNKFESFKSMSTQNGFIFYIPAWLTSKIDPSTGFVNLLKTKYTSIADSKKFISSFDRIMYVPEEDLFEFALDYKNFSRTDADYIKKWKLYSYGNRIRIFRNPKKNNVFDWEEVCLTSAYKELFNKYGINYQQGDIRALLCEQSDKAFYSSFMALMSLMLQMRNSITGRTDVDFLISPVKNSDGIFYDSRNYEAQENAILPKNADANGAYNIARKVLWAIGQFKKAEDEKLDKVKIAISNKEWLEYAQTSVKHSGGSGGSGGSTNLSDIIEKETGKQLVIQESILMLPEEVEEVIGNKPESDILVHTAYDESTDENVMLLTSDAPEYKPWALVIQDSNGENKIKMLSGGSKRTADGSEFEPKKKRKVGSG

SEQ ID NO: 322 - protein, 1739 aa, Synthetic construct
MKRTADGSEFESPKKKRKVEASPASGPRHLMDPHIFTSNFNNGIGRHKTYLCYEVERLDNGTSVKMDQHRGFLHNQAKNLLCGFYGRHAELRFLDLVPSLQLDPAQIYRVTWFISWSPCFSWGCAGEVRAFLQENTHVRLRIFAARIYDYDPLYKEALQMLRDAGAQVSIMTYDEFKHCWDTFVDHQGCPFQPWDGLDEHSQALSGRLRAILQNQGNSTSQSDGSSVPADIDQSSDSDQSSSQGQPGSKLEKFTNCYSLSKTLRFKAIPVGKTQENIDNKRLLVEDEKRAEDYKGVKKLLDRYYLSFINDVLHSIKLKNLNNYISLFRKKTRTEKENKELENLEINLRKEIAKAFKGNEGYKSLFKKDIIETILPEFLDDKDEIALVNSFNGFTTAFTGFFDNRENMFSEEAKSTSIAFRCINENLTRYISNMDIFEKVDAIFDKHEVQEIKEKILNSDYDVEDFFEGEFFNFVLTQEGIDVYNAIIGGFVTESGEKIKGLNEYINLYNQKTKQKLPKFKPLYKQVLSDRESLSFYGGSSGENQTTQKGQKNSRERMKRIEEGIKELGSQILKEHPVENTQLQNEKLYLYYLQNGRDMYVDQELDINRLSDYDVDHIVPQSFLKDDSIDNKVLTRSDKNRGKSDNVPSEEVVKKMKNYWRQLLNAKLITQRKFDNLTKAERGGLSEGYTSDEEVLEVFRNTLNKNSEIFSSIKKLEKLFKNFDEYSSAGIFVKNGPAISTISKDIFGEWNVIRDKWNAEYDDIHLKKKAVVTEKYEDDRRKSFKKIGSFSLEQLQEYADADLSVVEKLKEIIIQKVDEIYKVYGSSEKLFDADFVLEKSLKKNDAVVAIMKDLLDSVKSFENYIKAFFGEGKETNRDESFYGDFVLAYDILLKVDHIYDAIRNYVTQKPYSKDKFKLYFQNPQFMGGWDKDKETDYRATILRYGSKYYLAIMDKKYAKCLQKIDKDDVNGNYEKINYKLLPGPNKMLPKVFFSKKWMAYYNPSEDIQKIYKNGTFKKGDMFNLNDCHKLIDFFKDSISRYPKWSNAYDFNFSETEKYKDIAGFYREVEEQGYKVSFESASKKEVDKLVEEGKLYMFQIYNKDFSDKSHGTPNLHTMYFKLLFDENNHGQIRLSGGAELFMRRASLKKEELVVHPANSPIANKNPDNPKKTTTLSYDVYKDKRFSEDQYELHIPIAINKCPKNIFKINTEVRVLLKHDDNPYVIGIARGERNLLYIVVVDGKGNIVEQYSLNEIINNFNGIRIKTDYHSLLDKKEKERFEARQNWTSIENIKELKAGYISQVVHKICELVEKYDAVIALEDLNSGFKNSRVKVEKQVYQKFEKMLIDKLNYMVDKKSNPCATGGALKGYQITNKFESFKSMSTQNGFIFYIPAWLTSKIDPSTGFVNLLKTKYTSIADSKKFISSFDRIMYVPEEDLFEFALDYKNFSRTDADYIKKWKLYSYGNRIRIFRNPKKNNVFDWEEVCLTSAYKELFNKYGINYQQGDIRALLCEQSDKAFYSSFMALMSLMLQMRNSITGRTDVDFLISPVKNSDGIFYDSRNYEAQENAILPKNADANGAYNIARKVLWAIGQFKKAEDEKLDKVKIAISNKEWLEYAQTSVKHSGGSGGSGGSTNLSDIIEKETGKQLVIQESILMLPEEVEEVIGNKPESDILVHTAYDESTDENVMLLTSDAPEYKPWALVIQDSNGENKIKMLSGGSKRTADGSEFEPKKKRKVGSG

SEQ ID NO: 323 - protein, 1741 aa, Synthetic construct
MKRTADGSEFESPKKKRKVEASPASGPRHLMDPHIFTSNFNNGIGRHKTYLCYEVERLDNGTSVKMDQHRGFLHNQAKNLLCGFYGRHAELRFLDLVPSLQLDPAQIYRVTWFISWSPCFSWGCAGEVRAFLQENTHVRLRIFAARIYDYDPLYKEALQMLRDAGAQVSIMTYDEFKHCWDTFVDHQGCPFQPWDGLDEHSQALSGRLRAILQNQGNSTSQSDGSSVPADIDQSSDSDQSSSQGQPGSKLEKFTNCYSLSKTLRFKAIPVGKTQENIDNKRLLVEDEKRAEDYKGVKKLLDRYYLSFINDVLHSIKLKNLNNYISLFRKKTRTEKENKELENLEINLRKEIAKAFKGNEGYKSLFKKDIIETILPEFLDDKDEIALVNSFNGFTTAFTGFFDNRENMFSEEAKSTSIAFRCINENLTRYISNMDIFEKVDAIFDKHEVQEIKEKILNSDYDVEDFFEGEFFNFVLTQEGIDVYNAIIGGFVTESGEKIKGLNEYINLYNQKTKQKLPKFKPLYKQVLSDRESLSFYGGSSGENQTTQKGQKNSRERMKRIEEGIKELGSQILKEHPVENTQLQNEKLYLYYLQNGRDMYVDQELDINRLSDYDVDHIVPQSFLKDDSIDNKVLTRSDKNRGKSDNVPSEEVVKKMKNYWRQLLNAKLITQRKFDNLTKAERGGLSGSEGYTSDEEVLEVFRNTLNKNSEIFSSIKKLEKLFKNFDEYSSAGIFVKNGPAISTISKDIFGEWNVIRDKWNAEYDDIHLKKKAVVTEKYEDDRRKSFKKIGSFSLEQLQEYADADLSVVEKLKEIIIQKVDEIYKVYGSSEKLFDADFVLEKSLKKNDAVVAIMKDLLDSVKSFENYIKAFFGEGKETNRDESFYGDFVLAYDILLKVDHIYDAIRNYVTQKPYSKDKFKLYFQNPQFMGGWDKDKETDYRATILRYGSKYYLAIMDKKYAKCLQKIDKDDVNGNYEKINYKLLPGPNKMLPKVFFSKKWMAYYNPSEDIQKIYKNGTFKKGDMFNLNDCHKLIDFFKDSISRYPKWSNAYDFNFSETEKYKDIAGFYREVEEQGYKVSFESASKKEVDKLVEEGKLYMFQIYNKDFSDKSHGTPNLHTMYFKLLFDENNHGQIRLSGGAELFMRRASLKKEELVVHPANSPIANKNPDNPKKTTTLSYDVYKDKRFSEDQYELHIPIAINKCPKNIFKINTEVRVLLKHDDNPYVIGIARGERNLLYIVVVDGKGNIVEQYSLNEIINNFNGIRIKTDYHSLLDKKEKERFEARQNWTSIENIKELKAGYISQVVHKICELVEKYDAVIALEDLNSGFKNSRVKVEKQVYQKFEKMLIDKLNYMVDKKSNPCATGGALKGYQITNKFESFKSMSTQNGFIFYIPAWLTSKIDPSTGFVNLLKTKYTSIADSKKFISSFDRIMYVPEEDLFEFALDYKNFSRTDADYIKKWKLYSYGNRIRIFRNPKKNNVFDWEEVCLTSAYKELFNKYGINYQQGDIRALLCEQSDKAFYSSFMALMSLMLQMRNSITGRTDVDFLISPVKNSDGIFYDSRNYEAQENAILPKNADANGAYNIARKVLWAIGQFKKAEDEKLDKVKIAISNKEWLEYAQTSVKHSGGSGGSGGSTNLSDIIEKETGKQLVIQESILMLPEEVEEVIGNKPESDILVHTAYDESTDENVMLLTSDAPEYKPWALVIQDSNGENKIKMLSGGSKRTADGSEFEPKKKRKVGSG

SEQ ID NO: 324 - protein, 1734 aa, Synthetic construct
MKRTADGSEFESPKKKRKVMEASPASGPRHLMDPHIFTSNFNNGIGRHKTYLCYEVERLDNGTSVKMDQHRGFLHNQAKNLLCGFYGRHAELRFLDLVPSLQLDPAQIYRVTWFISWSPCFSWGCAGEVRAFLQENTHVRLRIFAARIYDYDPLYKEALQMLRDAGAQVSIMTYDEFKHCWDTFVDHQGCPFQPWDGLDEHSQALSGRLRAILQNQGNSGSETPGTSESATPESMSKLEKFTNCYSLSKTLRFKAIPVGKTQENIDNKRLLVEDEKRAEDYKGVKKLLDRYYLSFINDVLHSIKLKNLNNYISLFRKKTRTEKENKELENLEINLRKEIAKAFKGNEGYKSLFKKDIIETILPEFLDDKDEIALVNSFNGFTTAFTGFFDNRENMFSEEAKSTSIAFRCINENLTRYISNMDIFEKVDAIFDKHEVQEIKEKILNSDYDVEDFFEGEFFNFVLTQEGIDVYNAIIGGFVTESGEKIKGLNEYINLYNQKTKQKLPKFKPLYKQVLSDRESLSFYGEGSSGENQTTQKGQKNSRERMKRIEEGIKELGSQILKEHPVENTQLQNEKLYLYYLQNGRDMYVDQELDINRLSDYDVDHIVPQSFLKDDSIDNKVLTRSDKNRGKSDNVPSEEVVKKMKNYWRQLLNAKLITQRKFDNLTKAERGGLSGYTSDEEVLEVFRNTLNKNSEIFSSIKKLEKLFKNFDEYSSAGIFVKNGPAISTISKDIFGEWNVIRDKWNAEYDDIHLKKKAVVTEKYEDDRRKSFKKIGSFSLEQLQEYADADLSVVEKLKEIIIQKVDEIYKVYGSSEKLFDADFVLEKSLKKNDAVVAIMKDLLDSVKSFENYIKAFFGEGKETNRDESFYGDFVLAYDILLKVDHIYDAIRNYVTQKPYSKDKFKLYFQNPQFMGGWDKDKETDYRATILRYGSKYYLAIMDKKYAKCLQKIDKDDVNGNYEKINYKLLPGPNKMLPKVFFSKKWMAYYNPSEDIQKIYKNGTFKKGDMFNLNDCHKLIDFFKDSISRYPKWSNAYDFNFSETEKYKDIAGFYREVEEQGYKVSFESASKKEVDKLVEEGKLYMFQIYNKDFSDKSHGTPNLHTMYFKLLFDENNHGQIRLSGGAELFMRRASLKKEELVVHPANSPIANKNPDNPKKTTTLSYDVYKDKRFSEDQYELHIPIAINKCPKNIFKINTEVRVLLKHDDNPYVIGIARGERNLLYIVVVDGKGNIVEQYSLNEIINNFNGIRIKTDYHSLLDKKEKERFEARQNWTSIENIKELKAGYISQVVHKICELVEKYDAVIALEDLNSGFKNSRVKVEKQVYQKFEKMLIDKLNYMVDKKSNPCATGGALKGYQITNKFESFKSMSTQNGFIFYIPAWLTSKIDPSTGFVNLLKTKYTSIADSKKFISSFDRIMYVPEEDLFEFALDYKNFSRTDADYIKKWKLYSYGNRIRIFRNPKKNNVFDWEEVCLTSAYKELFNKYGINYQQGDIRALLCEQSDKAFYSSFMALMSLMLQMRNSITGRTDVDFLISPVKNSDGIFYDSRNYEAQENAILPKNADANGAYNIARKVLWAIGQFKKAEDEKLDKVKIAISNKEWLEYAQTSVKHGSPKKKRKVSGGSTNLSDIIEKETGKQLVIQESILMLPEEVEEVIGNKPESDILVHTAYDESTDENVMLLTSDAPEYKPWALVIQDSNGENKIKMLTKYDSGGSKRTADGSEFEPKKKRKVGSG

SEQ ID NO: 325 - protein, 1734 aa, Synthetic construct
MKRTADGSEFESPKKKRKVMEASPASGPRHLMDPHIFTSNFNNGIGRHKTYLCYEVERLDNGTSVKMDQHRGFLHNQAKNLLCGFYGRHAELRFLDLVPSLQLDPAQIYRVTWFISWSPCFSWGCAGEVRAFLQENTHVRLRIFAARIYDYDPLYKEALQMLRDAGAQVSIMTYDEFKHCWDTFVDHQGCPFQPWDGLDEHSQALSGRLRAILQNQGNSGSETPGTSESATPESMSKLEKFTNCYSLSKTLRFKAIPVGKTQENIDNKRLLVEDEKRAEDYKGVKKLLDRYYLSFINDVLHSIKLKNLNNYISLFRKKTRTEKENKELENLEINLRKEIAKAFKGNEGYKSLFKKDIIETILPEFLDDKDEIALVNSFNGFTTAFTGFFDNRENMFSEEAKSTSIAFRCINENLTRYISNMDIFEKVDAIFDKHEVQEIKEKILNSDYDVEDFFEGEFFNFVLTQEGIDVYNAIIGGFVTESGEKIKGLNEYINLYNQKTKQKLPKFKPLYKQVLSDRESLSFYGGSSGENQTTQKGQKNSRERMKRIEEGIKELGSQILKEHPVENTQLQNEKLYLYYLQNGRDMYVDQELDINRLSDYDVDHIVPQSFLKDDSIDNKVLTRSDKNRGKSDNVPSEEVVKKMKNYWRQLLNAKLITQRKFDNLTKAERGGLSEGYTSDEEVLEVFRNTLNKNSEIFSSIKKLEKLFKNFDEYSSAGIFVKNGPAISTISKDIFGEWNVIRDKWNAEYDDIHLKKKAVVTEKYEDDRRKSFKKIGSFSLEQLQEYADADLSVVEKLKEIIIQKVDEIYKVYGSSEKLFDADFVLEKSLKKNDAVVAIMKDLLDSVKSFENYIKAFFGEGKETNRDESFYGDFVLAYDILLKVDHIYDAIRNYVTQKPYSKDKFKLYFQNPQFMGGWDKDKETDYRATILRYGSKYYLAIMDKKYAKCLQKIDKDDVNGNYEKINYKLLPGPNKMLPKVFFSKKWMAYYNPSEDIQKIYKNGTFKKGDMFNLNDCHKLIDFFKDSISRYPKWSNAYDFNFSETEKYKDIAGFYREVEEQGYKVSFESASKKEVDKLVEEGKLYMFQIYNKDFSDKSHGTPNLHTMYFKLLFDENNHGQIRLSGGAELFMRRASLKKEELVVHPANSPIANKNPDNPKKTTTLSYDVYKDKRFSEDQYELHIPIAINKCPKNIFKINTEVRVLLKHDDNPYVIGIARGERNLLYIVVVDGKGNIVEQYSLNEIINNFNGIRIKTDYHSLLDKKEKERFEARQNWTSIENIKELKAGYISQVVHKICELVEKYDAVIALEDLNSGFKNSRVKVEKQVYQKFEKMLIDKLNYMVDKKSNPCATGGALKGYQITNKFESFKSMSTQNGFIFYIPAWLTSKIDPSTGFVNLLKTKYTSIADSKKFISSFDRIMYVPEEDLFEFALDYKNFSRTDADYIKKWKLYSYGNRIRIFRNPKKNNVFDWEEVCLTSAYKELFNKYGINYQQGDIRALLCEQSDKAFYSSFMALMSLMLQMRNSITGRTDVDFLISPVKNSDGIFYDSRNYEAQENAILPKNADANGAYNIARKVLWAIGQFKKAEDEKLDKVKIAISNKEWLEYAQTSVKHGSPKKKRKVSGGSTNLSDIIEKETGKQLVIQESILMLPEEVEEVIGNKPESDILVHTAYDESTDENVMLLTSDAPEYKPWALVIQDSNGENKIKMLTKYDSGGSKRTADGSEFEPKKKRKVGSG

SEQ ID NO: 326 - protein, 1736 aa, Synthetic construct
MKRTADGSEFESPKKKRKVMEASPASGPRHLMDPHIFTSNFNNGIGRHKTYLCYEVERLDNGTSVKMDQHRGFLHNQAKNLLCGFYGRHAELRFLDLVPSLQLDPAQIYRVTWFISWSPCFSWGCAGEVRAFLQENTHVRLRIFAARIYDYDPLYKEALQMLRDAGAQVSIMTYDEFKHCWDTFVDHQGCPFQPWDGLDEHSQALSGRLRAILQNQGNSGSETPGTSESATPESMSKLEKFTNCYSLSKTLRFKAIPVGKTQENIDNKRLLVEDEKRAEDYKGVKKLLDRYYLSFINDVLHSIKLKNLNNYISLFRKKTRTEKENKELENLEINLRKEIAKAFKGNEGYKSLFKKDIIETILPEFLDDKDEIALVNSFNGFTTAFTGFFDNRENMFSEEAKSTSIAFRCINENLTRYISNMDIFEKVDAIFDKHEVQEIKEKILNSDYDVEDFFEGEFFNFVLTQEGIDVYNAIIGGFVTESGEKIKGLNEYINLYNQKTKQKLPKFKPLYKQVLSDRESLSFYGGSSGENQTTQKGQKNSRERMKRIEEGIKELGSQILKEHPVENTQLQNEKLYLYYLQNGRDMYVDQELDINRLSDYDVDHIVPQSFLKDDSIDNKVLTRSDKNRGKSDNVPSEEVVKKMKNYWRQLLNAKLITQRKFDNLTKAERGGLSGSEGYTSDEEVLEVFRNTLNKNSEIFSSIKKLEKLFKNFDEYSSAGIFVKNGPAISTISKDIFGEWNVIRDKWNAEYDDIHLKKKAVVTEKYEDDRRKSFKKIGSFSLEQLQEYADADLSVVEKLKEIIIQKVDEIYKVYGSSEKLFDADFVLEKSLKKNDAVVAIMKDLLDSVKSFENYIKAFFGEGKETNRDESFYGDFVLAYDILLKVDHIYDAIRNYVTQKPYSKDKFKLYFQNPQFMGGWDKDKETDYRATILRYGSKYYLAIMDKKYAKCLQKIDKDDVNGNYEKINYKLLPGPNKMLPKVFFSKKWMAYYNPSEDIQKIYKNGTFKKGDMFNLNDCHKLIDFFKDSISRYPKWSNAYDFNFSETEKYKDIAGFYREVEEQGYKVSFESASKKEVDKLVEEGKLYMFQIYNKDFSDKSHGTPNLHTMYFKLLFDENNHGQIRLSGGAELFMRRASLKKEELVVHPANSPIANKNPDNPKKTTTLSYDVYKDKRFSEDQYELHIPIAINKCPKNIFKINTEVRVLLKHDDNPYVIGIARGERNLLYIVVVDGKGNIVEQYSLNEIINNFNGIRIKTDYHSLLDKKEKERFEARQNWTSIENIKELKAGYISQVVHKICELVEKYDAVIALEDLNSGFKNSRVKVEKQVYQKFEKMLIDKLNYMVDKKSNPCATGGALKGYQITNKFESFKSMSTQNGFIFYIPAWLTSKIDPSTGFVNLLKTKYTSIADSKKFISSFDRIMYVPEEDLFEFALDYKNFSRTDADYIKKWKLYSYGNRIRIFRNPKKNNVFDWEEVCLTSAYKELFNKYGINYQQGDIRALLCEQSDKAFYSSFMALMSLMLQMRNSITGRTDVDFLISPVKNSDGIFYDSRNYEAQENAILPKNADANGAYNIARKVLWAIGQFKKAEDEKLDKVKIAISNKEWLEYAQTSVKHGSPKKKRKVSGGSTNLSDIIEKETGKQLVIQESILMLPEEVEEVIGNKPESDILVHTAYDESTDENVMLLTSDAPEYKPWALVIQDSNGENKIKMLTKYDSGGSKRTADGSEFEPKKKRKVGSG

SEQ ID NO: 327 - protein, 1616 aa, Synthetic construct
MKRTADGSEFESPKKKRKVSEVEFSHEYWMRHALTLAKRARDEREVPVGAVLVLNNRVIGEGWNRAIGLHDPTAHAEIMALRQGGLVMQNYRLIDATLYVTFEPCVMCAGAMIHSRIGRVVFGVRNSKRGAAGSLMNVLNYPGMNHRVEITEGILADECAALLCDFYRMPRQVFNAQKKAQSSINSGGSSGGSSGSETPGTSESATPESSGGSSGGSSKLEKFTNCYSLSKTLRFKAIPVGKTQENIDNKRLLVEDEKRAEDYKGVKKLLDRYYLSFINDVLHSIKLKNLNNYISLFRKKTRTEKENKELENLEINLRKEIAKAFKGNEGYKSLFKKDIIETILPEFLDDKDEIALVNSFNGFTTAFTGFFDNRENMFSEEAKSTSIAFRCINENLTRYISNMDIFEKVDAIFDKHEVQEIKEKILNSDYDVEDFFEGEFFNFVLTQEGIDVYNAIIGGFVTESGEKIKGLNEYINLYNQKTKQKLPKFKPLYKQVLSDRESLSFYGEGSSGENQTTQKGQKNSRERMKRIEEGIKELGSQILKEHPVENTQLQNEKLYLYYLQNGRDMYVDQELDINRLSDYDVDHIVPQSFLKDDSIDNKVLTRSDKNRGKSDNVPSEEVVKKMKNYWRQLLNAKLITQRKFDNLTKAERGGLSGYTSDEEVLEVFRNTLNKNSEIFSSIKKLEKLFKNFDEYSSAGIFVKNGPAISTISKDIFGEWNVIRDKWNAEYDDIHLKKKAVVTEKYEDDRRKSFKKIGSFSLEQLQEYADADLSVVEKLKEIIIQKVDEIYKVYGSSEKLFDADFVLEKSLKKNDAVVAIMKDLLDSVKSFENYIKAFFGEGKETNRDESFYGDFVLAYDILLKVDHIYDAIRNYVTQKPYSKDKFKLYFQNPQFMGGWDKDKETDYRATILRYGSKYYLAIMDKKYAKCLQKIDKDDVNGNYEKINYKLLPGPNKMLPKVFFSKKWMAYYNPSEDIQKIYKNGTFKKGDMFNLNDCHKLIDFFKDSISRYPKWSNAYDFNFSETEKYKDIAGFYREVEEQGYKVSFESASKKEVDKLVEEGKLYMFQIYNKDFSDKSHGTPNLHTMYFKLLFDENNHGQIRLSGGAELFMRRASLKKEELVVHPANSPIANKNPDNPKKTTTLSYDVYKDKRFSEDQYELHIPIAINKCPKNIFKINTEVRVLLKHDDNPYVIGIARGERNLLYIVVVDGKGNIVEQYSLNEIINNFNGIRIKTDYHSLLDKKEKERFEARQNWTSIENIKELKAGYISQVVHKICELVEKYDAVIALEDLNSGFKNSRVKVEKQVYQKFEKMLIDKLNYMVDKKSNPCATGGALKGYQITNKFESFKSMSTQNGFIFYIPAWLTSKIDPSTGFVNLLKTKYTSIADSKKFISSFDRIMYVPEEDLFEFALDYKNFSRTDADYIKKWKLYSYGNRIRIFRNPKKNNVFDWEEVCLTSAYKELFNKYGINYQQGDIRALLCEQSDKAFYSSFMALMSLMLQMRNSITGRTDVDFLISPVKNSDGIFYDSRNYEAQENAILPKNADANGAYNIARKVLWAIGQFKKAEDEKLDKVKIAISNKEWLEYAQTSVKHSGGSKRTADGSEFEPKKKRKVGSG

SEQ ID NO: 328 - protein, 1616 aa, Synthetic construct
MKRTADGSEFESPKKKRKVSEVEFSHEYWMRHALTLAKRARDEREVPVGAVLVLNNRVIGEGWNRAIGLHDPTAHAEIMALRQGGLVMQNYRLIDATLYVTFEPCVMCAGAMIHSRIGRVVFGVRNSKRGAAGSLMNVLNYPGMNHRVEITEGILADECAALLCDFYRMPRQVFNAQKKAQSSINSGGSSGGSSGSETPGTSESATPESSGGSSGGSSKLEKFTNCYSLSKTLRFKAIPVGKTQENIDNKRLLVEDEKRAEDYKGVKKLLDRYYLSFINDVLHSIKLKNLNNYISLFRKKTRTEKENKELENLEINLRKEIAKAFKGNEGYKSLFKKDIIETILPEFLDDKDEIALVNSFNGFTTAFTGFFDNRENMFSEEAKSTSIAFRCINENLTRYISNMDIFEKVDAIFDKHEVQEIKEKILNSDYDVEDFFEGEFFNFVLTQEGIDVYNAIIGGFVTESGEKIKGLNEYINLYNQKTKQKLPKFKPLYKQVLSDRESLSFYGGSSGENQTTQKGQKNSRERMKRIEEGIKELGSQILKEHPVENTQLQNEKLYLYYLQNGRDMYVDQELDINRLSDYDVDHIVPQSFLKDDSIDNKVLTRSDKNRGKSDNVPSEEVVKKMKNYWRQLLNAKLITQRKFDNLTKAERGGLSEGYTSDEEVLEVFRNTLNKNSEIFSSIKKLEKLFKNFDEYSSAGIFVKNGPAISTISKDIFGEWNVIRDKWNAEYDDIHLKKKAVVTEKYEDDRRKSFKKIGSFSLEQLQEYADADLSVVEKLKEIIIQKVDEIYKVYGSSEKLFDADFVLEKSLKKNDAVVAIMKDLLDSVKSFENYIKAFFGEGKETNRDESFYGDFVLAYDILLKVDHIYDAIRNYVTQKPYSKDKFKLYFQNPQFMGGWDKDKETDYRATILRYGSKYYLAIMDKKYAKCLQKIDKDDVNGNYEKINYKLLPGPNKMLPKVFFSKKWMAYYNPSEDIQKIYKNGTFKKGDMFNLNDCHKLIDFFKDSISRYPKWSNAYDFNFSETEKYKDIAGFYREVEEQGYKVSFESASKKEVDKLVEEGKLYMFQIYNKDFSDKSHGTPNLHTMYFKLLFDENNHGQIRLSGGAELFMRRASLKKEELVVHPANSPIANKNPDNPKKTTTLSYDVYKDKRFSEDQYELHIPIAINKCPKNIFKINTEVRVLLKHDDNPYVIGIARGERNLLYIVVVDGKGNIVEQYSLNEIINNFNGIRIKTDYHSLLDKKEKERFEARQNWTSIENIKELKAGYISQVVHKICELVEKYDAVIALEDLNSGFKNSRVKVEKQVYQKFEKMLIDKLNYMVDKKSNPCATGGALKGYQITNKFESFKSMSTQNGFIFYIPAWLTSKIDPSTGFVNLLKTKYTSIADSKKFISSFDRIMYVPEEDLFEFALDYKNFSRTDADYIKKWKLYSYGNRIRIFRNPKKNNVFDWEEVCLTSAYKELFNKYGINYQQGDIRALLCEQSDKAFYSSFMALMSLMLQMRNSITGRTDVDFLISPVKNSDGIFYDSRNYEAQENAILPKNADANGAYNIARKVLWAIGQFKKAEDEKLDKVKIAISNKEWLEYAQTSVKHSGGSKRTADGSEFEPKKKRKVGSG

SEQ ID NO: 329 - protein, 1618 aa, Synthetic construct
MKRTADGSEFESPKKKRKVSEVEFSHEYWMRHALTLAKRARDEREVPVGAVLVLNNRVIGEGWNRAIGLHDPTAHAEIMALRQGGLVMQNYRLIDATLYVTFEPCVMCAGAMIHSRIGRVVFGVRNSKRGAAGSLMNVLNYPGMNHRVEITEGILADECAALLCDFYRMPRQVFNAQKKAQSSINSGGSSGGSSGSETPGTSESATPESSGGSSGGSSKLEKFTNCYSLSKTLRFKAIPVGKTQENIDNKRLLVEDEKRAEDYKGVKKLLDRYYLSFINDVLHSIKLKNLNNYISLFRKKTRTEKENKELENLEINLRKEIAKAFKGNEGYKSLFKKDIIETILPEFLDDKDEIALVNSFNGFTTAFTGFFDNRENMFSEEAKSTSIAFRCINENLTRYISNMDIFEKVDAIFDKHEVQEIKEKILNSDYDVEDFFEGEFFNFVLTQEGIDVYNAIIGGFVTESGEKIKGLNEYINLYNQKTKQKLPKFKPLYKQVLSDRESLSFYGGSSGENQTTQKGQKNSRERMKRIEEGIKELGSQILKEHPVENTQLQNEKLYLYYLQNGRDMYVDQELDINRLSDYDVDHIVPQSFLKDDSIDNKVLTRSDKNRGKSDNVPSEEVVKKMKNYWRQLLNAKLITQRKFDNLTKAERGGLSGSEGYTSDEEVLEVFRNTLNKNSEIFSSIKKLEKLFKNFDEYSSAGIFVKNGPAISTISKDIFGEWNVIRDKWNAEYDDIHLKKKAVVTEKYEDDRRKSFKKIGSFSLEQLQEYADADLSVVEKLKEIIIQKVDEIYKVYGSSEKLFDADFVLEKSLKKNDAVVAIMKDLLDSVKSFENYIKAFFGEGKETNRDESFYGDFVLAYDILLKVDHIYDAIRNYVTQKPYSKDKFKLYFQNPQFMGGWDKDKETDYRATILRYGSKYYLAIMDKKYAKCLQKIDKDDVNGNYEKINYKLLPGPNKMLPKVFFSKKWMAYYNPSEDIQKIYKNGTFKKGDMFNLNDCHKLIDFFKDSISRYPKWSNAYDFNFSETEKYKDIAGFYREVEEQGYKVSFESASKKEVDKLVEEGKLYMFQIYNKDFSDKSHGTPNLHTMYFKLLFDENNHGQIRLSGGAELFMRRASLKKEELVVHPANSPIANKNPDNPKKTTTLSYDVYKDKRFSEDQYELHIPIAINKCPKNIFKINTEVRVLLKHDDNPYVIGIARGERNLLYIVVVDGKGNIVEQYSLNEIINNFNGIRIKTDYHSLLDKKEKERFEARQNWTSIENIKELKAGYISQVVHKICELVEKYDAVIALEDLNSGFKNSRVKVEKQVYQKFEKMLIDKLNYMVDKKSNPCATGGALKGYQITNKFESFKSMSTQNGFIFYIPAWLTSKIDPSTGFVNLLKTKYTSIADSKKFISSFDRIMYVPEEDLFEFALDYKNFSRTDADYIKKWKLYSYGNRIRIFRNPKKNNVFDWEEVCLTSAYKELFNKYGINYQQGDIRALLCEQSDKAFYSSFMALMSLMLQMRNSITGRTDVDFLISPVKNSDGIFYDSRNYEAQENAILPKNADANGAYNIARKVLWAIGQFKKAEDEKLDKVKIAISNKEWLEYAQTSVKHSGGSKRTADGSEFEPKKKRKVGSG

SEQ ID NO: 330 - protein, 1373 aa, Synthetic construct
MGSKLEKFTNCYSLSKTLRFKAIPVGKTQENIDNKRLLVEDEKRAEDYKGVKKLLDRYYLSFINDVLHSIKLKNLNNYISLFRKKTRTEKENKELENLEINLRKEIAKAFKGNEGYKSLFKKDIIETILPEFLDDKDEIALVNSFNGFTTAFTGFFDNRENMFSEEAKSTSIAFRCINENLTRYISNMDIFEKVDAIFDKHEVQEIKEKILNSDYDVEDFFEGEFFNFVLTQEGIDVYNAIIGGFVTESGEKIKGLNEYINLYNQKTKQKLPKFKPLYKQVLSDRESLSFYGENQTTQKGQKNSRERMKRIEEGIKELGSQILKEHPVENTQLQNEKLYLYYLQNGRDMYVDQELDINRLSDYDVDHIVPQSFLKDDSIDNKVLTRSDKNRGKSDNVPSEEVVKKMKNYWRQLLNAKLITQRKFDNLTKAERGGLSEGYTSDEEVLEVFRNTLNKNSEIFSSIKKLEKLFKNFDEYSSAGIFVKNGPAISTISKDIFGEWNVIRDKWNAEYDDIHLKKKAVVTEKYEDDRRKSFKKIGSFSLEQLQEYADADLSVVEKLKEIIIQKVDEIYKVYGSSEKLFDADFVLEKSLKKNDAVVAIMKDLLDSVKSFENYIKAFFGEGKETNRDESFYGDFVLAYDILLKVDHIYDAIRNYVTQKPYSKDKFKLYFQNPQFMGGWDKDKETDYRATILRYGSKYYLAIMDKKYAKCLQKIDKDDVNGNYEKINYKLLPGPNKMLPKVFFSKKWMAYYNPSEDIQKIYKNGTFKKGDMFNLNDCHKLIDFFKDSISRYPKWSNAYDFNFSETEKYKDIAGFYREVEEQGYKVSFESASKKEVDKLVEEGKLYMFQIYNKDFSDKSHGTPNLHTMYFKLLFDENNHGQIRLSGGAELFMRRASLKKEELVVHPANSPIANKNPDNPKKTTTLSYDVYKDKRFSEDQYELHIPIAINKCPKNIFKINTEVRVLLKHDDNPYVIGIARGERNLLYIVVVDGKGNIVEQYSLNEIINNFNGIRIKTDYHSLLDKKEKERFEARQNWTSIENIKELKAGYISQVVHKICELVEKYDAVIALEDLNSGFKNSRVKVEKQVYQKFEKMLIDKLNYMVDKKSNPCATGGALKGYQITNKFESFKSMSTQNGFIFYIPAWLTSKIDPSTGFVNLLKTKYTSIADSKKFISSFDRIMYVPEEDLFEFALDYKNFSRTDADYIKKWKLYSYGNRIRIFRNPKKNNVFDWEEVCLTSAYKELFNKYGINYQQGDIRALLCEQSDKAFYSSFMALMSLMLQMRNSITGRTDVDFLISPVKNSDGIFYDSRNYEAQENAILPKNADANGAYNIARKVLWAIGQFKKAEDEKLDKVKIAISNKEWLEYAQTSVKH

SEQ ID NO: 331 - protein, 1375 aa, Synthetic construct
MGSKLEKFTNCYSLSKTLRFKAIPVGKTQENIDNKRLLVEDEKRAEDYKGVKKLLDRYYLSFINDVLHSIKLKNLNNYISLFRKKTRTEKENKELENLEINLRKEIAKAFKGNEGYKSLFKKDIIETILPEFLDDKDEIALVNSFNGFTTAFTGFFDNRENMFSEEAKSTSIAFRCINENLTRYISNMDIFEKVDAIFDKHEVQEIKEKILNSDYDVEDFFEGEFFNFVLTQEGIDVYNAIIGGFVTESGEKIKGLNEYINLYNQKTKQKLPKFKPLYKQVLSDRESLSFYGSGENQTTQKGQKNSRERMKRIEEGIKELGSQILKEHPVENTQLQNEKLYLYYLQNGRDMYVDQELDINRLSDYDVDHIVPQSFLKDDSIDNKVLTRSDKNRGKSDNVPSEEVVKKMKNYWRQLLNAKLITQRKFDNLTKAERGGLSEGYTSDEEVLEVFRNTLNKNSEIFSSIKKLEKLFKNFDEYSSAGIFVKNGPAISTISKDIFGEWNVIRDKWNAEYDDIHLKKKAVVTEKYEDDRRKSFKKIGSFSLEQLQEYADADLSVVEKLKEIIIQKVDEIYKVYGSSEKLFDADFVLEKSLKKNDAVVAIMKDLLDSVKSFENYIKAFFGEGKETNRDESFYGDFVLAYDILLKVDHIYDAIRNYVTQKPYSKDKFKLYFQNPQFMGGWDKDKETDYRATILRYGSKYYLAIMDKKYAKCLQKIDKDDVNGNYEKINYKLLPGPNKMLPKVFFSKKWMAYYNPSEDIQKIYKNGTFKKGDMFNLNDCHKLIDFFKDSISRYPKWSNAYDFNFSETEKYKDIAGFYREVEEQGYKVSFESASKKEVDKLVEEGKLYMFQIYNKDFSDKSHGTPNLHTMYFKLLFDENNHGQIRLSGGAELFMRRASLKKEELVVHPANSPIANKNPDNPKKTTTLSYDVYKDKRFSEDQYELHIPIAINKCPKNIFKINTEVRVLLKHDDNPYVIGIARGERNLLYIVVVDGKGNIVEQYSLNEIINNFNGIRIKTDYHSLLDKKEKERFEARQNWTSIENIKELKAGYISQVVHKICELVEKYDAVIALEDLNSGFKNSRVKVEKQVYQKFEKMLIDKLNYMVDKKSNPCATGGALKGYQITNKFESFKSMSTQNGFIFYIPAWLTSKIDPSTGFVNLLKTKYTSIADSKKFISSFDRIMYVPEEDLFEFALDYKNFSRTDADYIKKWKLYSYGNRIRIFRNPKKNNVFDWEEVCLTSAYKELFNKYGINYQQGDIRALLCEQSDKAFYSSFMALMSLMLQMRNSITGRTDVDFLISPVKNSDGIFYDSRNYEAQENAILPKNADANGAYNIARKVLWAIGQFKKAEDEKLDKVKIAISNKEWLEYAQTSVKH

SEQ ID NO: 332 - protein, 1377 aa, Synthetic construct
MGSKLEKFTNCYSLSKTLRFKAIPVGKTQENIDNKRLLVEDEKRAEDYKGVKKLLDRYYLSFINDVLHSIKLKNLNNYISLFRKKTRTEKENKELENLEINLRKEIAKAFKGNEGYKSLFKKDIIETILPEFLDDKDEIALVNSFNGFTTAFTGFFDNRENMFSEEAKSTSIAFRCINENLTRYISNMDIFEKVDAIFDKHEVQEIKEKILNSDYDVEDFFEGEFFNFVLTQEGIDVYNAIIGGFVTESGEKIKGLNEYINLYNQKTKQKLPKFKPLYKQVLSDRESLSFYGGSSGENQTTQKGQKNSRERMKRIEEGIKELGSQILKEHPVENTQLQNEKLYLYYLQNGRDMYVDQELDINRLSDYDVDHIVPQSFLKDDSIDNKVLTRSDKNRGKSDNVPSEEVVKKMKNYWRQLLNAKLITQRKFDNLTKAERGGLSEGYTSDEEVLEVFRNTLNKNSEIFSSIKKLEKLFKNFDEYSSAGIFVKNGPAISTISKDIFGEWNVIRDKWNAEYDDIHLKKKAVVTEKYEDDRRKSFKKIGSFSLEQLQEYADADLSVVEKLKEIIIQKVDEIYKVYGSSEKLFDADFVLEKSLKKNDAVVAIMKDLLDSVKSFENYIKAFFGEGKETNRDESFYGDFVLAYDILLKVDHIYDAIRNYVTQKPYSKDKFKLYFQNPQFMGGWDKDKETDYRATILRYGSKYYLAIMDKKYAKCLQKIDKDDVNGNYEKINYKLLPGPNKMLPKVFFSKKWMAYYNPSEDIQKIYKNGTFKKGDMFNLNDCHKLIDFFKDSISRYPKWSNAYDFNFSETEKYKDIAGFYREVEEQGYKVSFESASKKEVDKLVEEGKLYMFQIYNKDFSDKSHGTPNLHTMYFKLLFDENNHGQIRLSGGAELFMRRASLKKEELVVHPANSPIANKNPDNPKKTTTLSYDVYKDKRFSEDQYELHIPIAINKCPKNIFKINTEVRVLLKHDDNPYVIGIARGERNLLYIVVVDGKGNIVEQYSLNEIINNFNGIRIKTDYHSLLDKKEKERFEARQNWTSIENIKELKAGYISQVVHKICELVEKYDAVIALEDLNSGFKNSRVKVEKQVYQKFEKMLIDKLNYMVDKKSNPCATGGALKGYQITNKFESFKSMSTQNGFIFYIPAWLTSKIDPSTGFVNLLKTKYTSIADSKKFISSFDRIMYVPEEDLFEFALDYKNFSRTDADYIKKWKLYSYGNRIRIFRNPKKNNVFDWEEVCLTSAYKELFNKYGINYQQGDIRALLCEQSDKAFYSSFMALMSLMLQMRNSITGRTDVDFLISPVKNSDGIFYDSRNYEAQENAILPKNADANGAYNIARKVLWAIGQFKKAEDEKLDKVKIAISNKEWLEYAQTSVKH

SEQ ID NO: 333 - protein, 1379 aa, Synthetic construct
MGSKLEKFTNCYSLSKTLRFKAIPVGKTQENIDNKRLLVEDEKRAEDYKGVKKLLDRYYLSFINDVLHSIKLKNLNNYISLFRKKTRTEKENKELENLEINLRKEIAKAFKGNEGYKSLFKKDIIETILPEFLDDKDEIALVNSFNGFTTAFTGFFDNRENMFSEEAKSTSIAFRCINENLTRYISNMDIFEKVDAIFDKHEVQEIKEKILNSDYDVEDFFEGEFFNFVLTQEGIDVYNAIIGGFVTESGEKIKGLNEYINLYNQKTKQKLPKFKPLYKQVLSDRESLSFYGGSSGENQTTQKGQKNSRERMKRIEEGIKELGSQILKEHPVENTQLQNEKLYLYYLQNGRDMYVDQELDINRLSDYDVDHIVPQSFLKDDSIDNKVLTRSDKNRGKSDNVPSEEVVKKMKNYWRQLLNAKLITQRKFDNLTKAERGGLSGSEGYTSDEEVLEVFRNTLNKNSEIFSSIKKLEKLFKNFDEYSSAGIFVKNGPAISTISKDIFGEWNVIRDKWNAEYDDIHLKKKAVVTEKYEDDRRKSFKKIGSFSLEQLQEYADADLSVVEKLKEIIIQKVDEIYKVYGSSEKLFDADFVLEKSLKKNDAVVAIMKDLLDSVKSFENYIKAFFGEGKETNRDESFYGDFVLAYDILLKVDHIYDAIRNYVTQKPYSKDKFKLYFQNPQFMGGWDKDKETDYRATILRYGSKYYLAIMDKKYAKCLQKIDKDDVNGNYEKINYKLLPGPNKMLPKVFFSKKWMAYYNPSEDIQKIYKNGTFKKGDMFNLNDCHKLIDFFKDSISRYPKWSNAYDFNFSETEKYKDIAGFYREVEEQGYKVSFESASKKEVDKLVEEGKLYMFQIYNKDFSDKSHGTPNLHTMYFKLLFDENNHGQIRLSGGAELFMRRASLKKEELVVHPANSPIANKNPDNPKKTTTLSYDVYKDKRFSEDQYELHIPIAINKCPKNIFKINTEVRVLLKHDDNPYVIGIARGERNLLYIVVVDGKGNIVEQYSLNEIINNFNGIRIKTDYHSLLDKKEKERFEARQNWTSIENIKELKAGYISQVVHKICELVEKYDAVIALEDLNSGFKNSRVKVEKQVYQKFEKMLIDKLNYMVDKKSNPCATGGALKGYQITNKFESFKSMSTQNGFIFYIPAWLTSKIDPSTGFVNLLKTKYTSIADSKKFISSFDRIMYVPEEDLFEFALDYKNFSRTDADYIKKWKLYSYGNRIRIFRNPKKNNVFDWEEVCLTSAYKELFNKYGINYQQGDIRALLCEQSDKAFYSSFMALMSLMLQMRNSITGRTDVDFLISPVKNSDGIFYDSRNYEAQENAILPKNADANGAYNIARKVLWAIGQFKKAEDEKLDKVKIAISNKEWLEYAQTSVKH

SEQ ID NO: 334 - protein, 1373 aa, Synthetic construct
MGSKLEKFTNCYSLSKTLRFKAIPVGKTQENIDNKRLLVEDEKRAEDYKGVKKLLDRYYLSFINDVLHSIKLKNLNNYISLFRKKTRTEKENKELENLEINLRKEIAKAFKGNEGYKSLFKKDIIETILPEFLDDKDEIALVNSFNGFTTAFTGFFDNRENMFSEEAKSTSIAFRCINENLTRYISNMDIFEKVDAIFDKHEVQEIKEKILNSDYDVEDFFEGEFFNFVLTQEGIDVYNAIIGGFVTESGEKIKGLNEYINLYNQKTKQKLPKFKPLYKQVLSDRESLSFYGEENQTTQKGQKNSRERMKRIEEGIKELGSQILKEHPVENTQLQNEKLYLYYLQNGRDMYVDQELDINRLSDYDVDHIVPQSFLKDDSIDNKVLTRSDKNRGKSDNVPSEEVVKKMKNYWRQLLNAKLITQRKFDNLTKAERGGLSGYTSDEEVLEVFRNTLNKNSEIFSSIKKLEKLFKNFDEYSSAGIFVKNGPAISTISKDIFGEWNVIRDKWNAEYDDIHLKKKAVVTEKYEDDRRKSFKKIGSFSLEQLQEYADADLSVVEKLKEIIIQKVDEIYKVYGSSEKLFDADFVLEKSLKKNDAVVAIMKDLLDSVKSFENYIKAFFGEGKETNRDESFYGDFVLAYDILLKVDHIYDAIRNYVTQKPYSKDKFKLYFQNPQFMGGWDKDKETDYRATILRYGSKYYLAIMDKKYAKCLQKIDKDDVNGNYEKINYKLLPGPNKMLPKVFFSKKWMAYYNPSEDIQKIYKNGTFKKGDMFNLNDCHKLIDFFKDSISRYPKWSNAYDFNFSETEKYKDIAGFYREVEEQGYKVSFESASKKEVDKLVEEGKLYMFQIYNKDFSDKSHGTPNLHTMYFKLLFDENNHGQIRLSGGAELFMRRASLKKEELVVHPANSPIANKNPDNPKKTTTLSYDVYKDKRFSEDQYELHIPIAINKCPKNIFKINTEVRVLLKHDDNPYVIGIARGERNLLYIVVVDGKGNIVEQYSLNEIINNFNGIRIKTDYHSLLDKKEKERFEARQNWTSIENIKELKAGYISQVVHKICELVEKYDAVIALEDLNSGFKNSRVKVEKQVYQKFEKMLIDKLNYMVDKKSNPCATGGALKGYQITNKFESFKSMSTQNGFIFYIPAWLTSKIDPSTGFVNLLKTKYTSIADSKKFISSFDRIMYVPEEDLFEFALDYKNFSRTDADYIKKWKLYSYGNRIRIFRNPKKNNVFDWEEVCLTSAYKELFNKYGINYQQGDIRALLCEQSDKAFYSSFMALMSLMLQMRNSITGRTDVDFLISPVKNSDGIFYDSRNYEAQENAILPKNADANGAYNIARKVLWAIGQFKKAEDEKLDKVKIAISNKEWLEYAQTSVKH

SEQ ID NO: 335 - protein, 1375 aa, Synthetic construct
MGSKLEKFTNCYSLSKTLRFKAIPVGKTQENIDNKRLLVEDEKRAEDYKGVKKLLDRYYLSFINDVLHSIKLKNLNNYISLFRKKTRTEKENKELENLEINLRKEIAKAFKGNEGYKSLFKKDIIETILPEFLDDKDEIALVNSFNGFTTAFTGFFDNRENMFSEEAKSTSIAFRCINENLTRYISNMDIFEKVDAIFDKHEVQEIKEKILNSDYDVEDFFEGEFFNFVLTQEGIDVYNAIIGGFVTESGEKIKGLNEYINLYNQKTKQKLPKFKPLYKQVLSDRESLSFYGEGSENQTTQKGQKNSRERMKRIEEGIKELGSQILKEHPVENTQLQNEKLYLYYLQNGRDMYVDQELDINRLSDYDVDHIVPQSFLKDDSIDNKVLTRSDKNRGKSDNVPSEEVVKKMKNYWRQLLNAKLITQRKFDNLTKAERGGLSGYTSDEEVLEVFRNTLNKNSEIFSSIKKLEKLFKNFDEYSSAGIFVKNGPAISTISKDIFGEWNVIRDKWNAEYDDIHLKKKAVVTEKYEDDRRKSFKKIGSFSLEQLQEYADADLSVVEKLKEIIIQKVDEIYKVYGSSEKLFDADFVLEKSLKKNDAVVAIMKDLLDSVKSFENYIKAFFGEGKETNRDESFYGDFVLAYDILLKVDHIYDAIRNYVTQKPYSKDKFKLYFQNPQFMGGWDKDKETDYRATILRYGSKYYLAIMDKKYAKCLQKIDKDDVNGNYEKINYKLLPGPNKMLPKVFFSKKWMAYYNPSEDIQKIYKNGTFKKGDMFNLNDCHKLIDFFKDSISRYPKWSNAYDFNFSETEKYKDIAGFYREVEEQGYKVSFESASKKEVDKLVEEGKLYMFQIYNKDFSDKSHGTPNLHTMYFKLLFDENNHGQIRLSGGAELFMRRASLKKEELVVHPANSPIANKNPDNPKKTTTLSYDVYKDKRFSEDQYELHIPIAINKCPKNIFKINTEVRVLLKHDDNPYVIGIARGERNLLYIVVVDGKGNIVEQYSLNEIINNFNGIRIKTDYHSLLDKKEKERFEARQNWTSIENIKELKAGYISQVVHKICELVEKYDAVIALEDLNSGFKNSRVKVEKQVYQKFEKMLIDKLNYMVDKKSNPCATGGALKGYQITNKFESFKSMSTQNGFIFYIPAWLTSKIDPSTGFVNLLKTKYTSIADSKKFISSFDRIMYVPEEDLFEFALDYKNFSRTDADYIKKWKLYSYGNRIRIFRNPKKNNVFDWEEVCLTSAYKELFNKYGINYQQGDIRALLCEQSDKAFYSSFMALMSLMLQMRNSITGRTDVDFLISPVKNSDGIFYDSRNYEAQENAILPKNADANGAYNIARKVLWAIGQFKKAEDEKLDKVKIAISNKEWLEYAQTSVKH

SEQ ID NO: 336 - protein, 1377 aa, Synthetic construct
MGSKLEKFTNCYSLSKTLRFKAIPVGKTQENIDNKRLLVEDEKRAEDYKGVKKLLDRYYLSFINDVLHSIKLKNLNNYISLFRKKTRTEKENKELENLEINLRKEIAKAFKGNEGYKSLFKKDIIETILPEFLDDKDEIALVNSFNGFTTAFTGFFDNRENMFSEEAKSTSIAFRCINENLTRYISNMDIFEKVDAIFDKHEVQEIKEKILNSDYDVEDFFEGEFFNFVLTQEGIDVYNAIIGGFVTESGEKIKGLNEYINLYNQKTKQKLPKFKPLYKQVLSDRESLSFYGEGSSGENQTTQKGQKNSRERMKRIEEGIKELGSQILKEHPVENTQLQNEKLYLYYLQNGRDMYVDQELDINRLSDYDVDHIVPQSFLKDDSIDNKVLTRSDKNRGKSDNVPSEEVVKKMKNYWRQLLNAKLITQRKFDNLTKAERGGLSGYTSDEEVLEVFRNTLNKNSEIFSSIKKLEKLFKNFDEYSSAGIFVKNGPAISTISKDIFGEWNVIRDKWNAEYDDIHLKKKAVVTEKYEDDRRKSFKKIGSFSLEQLQEYADADLSVVEKLKEIIIQKVDEIYKVYGSSEKLFDADFVLEKSLKKNDAVVAIMKDLLDSVKSFENYIKAFFGEGKETNRDESFYGDFVLAYDILLKVDHIYDAIRNYVTQKPYSKDKFKLYFQNPQFMGGWDKDKETDYRATILRYGSKYYLAIMDKKYAKCLQKIDKDDVNGNYEKINYKLLPGPNKMLPKVFFSKKWMAYYNPSEDIQKIYKNGTFKKGDMFNLNDCHKLIDFFKDSISRYPKWSNAYDFNFSETEKYKDIAGFYREVEEQGYKVSFESASKKEVDKLVEEGKLYMFQIYNKDFSDKSHGTPNLHTMYFKLLFDENNHGQIRLSGGAELFMRRASLKKEELVVHPANSPIANKNPDNPKKTTTLSYDVYKDKRFSEDQYELHIPIAINKCPKNIFKINTEVRVLLKHDDNPYVIGIARGERNLLYIVVVDGKGNIVEQYSLNEIINNFNGIRIKTDYHSLLDKKEKERFEARQNWTSIENIKELKAGYISQVVHKICELVEKYDAVIALEDLNSGFKNSRVKVEKQVYQKFEKMLIDKLNYMVDKKSNPCATGGALKGYQITNKFESFKSMSTQNGFIFYIPAWLTSKIDPSTGFVNLLKTKYTSIADSKKFISSFDRIMYVPEEDLFEFALDYKNFSRTDADYIKKWKLYSYGNRIRIFRNPKKNNVFDWEEVCLTSAYKELFNKYGINYQQGDIRALLCEQSDKAFYSSFMALMSLMLQMRNSITGRTDVDFLISPVKNSDGIFYDSRNYEAQENAILPKNADANGAYNIARKVLWAIGQFKKAEDEKLDKVKIAISNKEWLEYAQTSVKH

SEQ ID NO: 337 - protein, 1379 aa, Synthetic construct
MGSKLEKFTNCYSLSKTLRFKAIPVGKTQENIDNKRLLVEDEKRAEDYKGVKKLLDRYYLSFINDVLHSIKLKNLNNYISLFRKKTRTEKENKELENLEINLRKEIAKAFKGNEGYKSLFKKDIIETILPEFLDDKDEIALVNSFNGFTTAFTGFFDNRENMFSEEAKSTSIAFRCINENLTRYISNMDIFEKVDAIFDKHEVQEIKEKILNSDYDVEDFFEGEFFNFVLTQEGIDVYNAIIGGFVTESGEKIKGLNEYINLYNQKTKQKLPKFKPLYKQVLSDRESLSFYGEGSSGENQTTQKGQKNSRERMKRIEEGIKELGSQILKEHPVENTQLQNEKLYLYYLQNGRDMYVDQELDINRLSDYDVDHIVPQSFLKDDSIDNKVLTRSDKNRGKSDNVPSEEVVKKMKNYWRQLLNAKLITQRKFDNLTKAERGGLSGSGYTSDEEVLEVFRNTLNKNSEIFSSIKKLEKLFKNFDEYSSAGIFVKNGPAISTISKDIFGEWNVIRDKWNAEYDDIHLKKKAVVTEKYEDDRRKSFKKIGSFSLEQLQEYADADLSVVEKLKEIIIQKVDEIYKVYGSSEKLFDADFVLEKSLKKNDAVVAIMKDLLDSVKSFENYIKAFFGEGKETNRDESFYGDFVLAYDILLKVDHIYDAIRNYVTQKPYSKDKFKLYFQNPQFMGGWDKDKETDYRATILRYGSKYYLAIMDKKYAKCLQKIDKDDVNGNYEKINYKLLPGPNKMLPKVFFSKKWMAYYNPSEDIQKIYKNGTFKKGDMFNLNDCHKLIDFFKDSISRYPKWSNAYDFNFSETEKYKDIAGFYREVEEQGYKVSFESASKKEVDKLVEEGKLYMFQIYNKDFSDKSHGTPNLHTMYFKLLFDENNHGQIRLSGGAELFMRRASLKKEELVVHPANSPIANKNPDNPKKTTTLSYDVYKDKRFSEDQYELHIPIAINKCPKNIFKINTEVRVLLKHDDNPYVIGIARGERNLLYIVVVDGKGNIVEQYSLNEIINNFNGIRIKTDYHSLLDKKEKERFEARQNWTSIENIKELKAGYISQVVHKICELVEKYDAVIALEDLNSGFKNSRVKVEKQVYQKFEKMLIDKLNYMVDKKSNPCATGGALKGYQITNKFESFKSMSTQNGFIFYIPAWLTSKIDPSTGFVNLLKTKYTSIADSKKFISSFDRIMYVPEEDLFEFALDYKNFSRTDADYIKKWKLYSYGNRIRIFRNPKKNNVFDWEEVCLTSAYKELFNKYGINYQQGDIRALLCEQSDKAFYSSFMALMSLMLQMRNSITGRTDVDFLISPVKNSDGIFYDSRNYEAQENAILPKNADANGAYNIARKVLWAIGQFKKAEDEKLDKVKIAISNKEWLEYAQTSVKH

SEQ ID NO: 338 - protein, 1373 aa, Synthetic construct
MGSKLEKFTNCYSLSKTLRFKAIPVGKTQENIDNKRLLVEDEKRAEDYKGVKKLLDRYYLSFINDVLHSIKLKNLNNYISLFRKKTRTEKENKELENLEINLRKEIAKAFKGNEGYKSLFKKDIIETILPEFLDDKDEIALVNSFNGFTTAFTGFFDNRENMFSEEAKSTSIAFRCINENLTRYISNMDIFEKVDAIFDKHEVQEIKEKILNSDYDVEDFFEGEFFNFVLTQEGIDVYNAIIGGFVTESGEKIKGLNEYINLYNQKTKQKLPKFKPLYKQVLSDRESLSFYGENQTTQKGQKNSRERMKRIEEGIKELGSQILKEHPVENTQLQNEKLYLYYLQNGRDMYVDQELDINRLSDYDVDHIVPQSFLKDDSIDNKVLTRSDKNRGKSDNVPSEEVVKKMKNYWRQLLNAKLITQRKFDNLTKAERGGLSEGYTSDEEVLEVFRNTLNKNSEIFSSIKKLEKLFKNFDEYSSAGIFVKNGPAISTISKDIFGEWNVIRDKWNAEYDDIHLKKKAVVTEKYEDDRRKSFKKIGSFSLEQLQEYADADLSVVEKLKEIIIQKVDEIYKVYGSSEKLFDADFVLEKSLKKNDAVVAIMKDLLDSVKSFENYIKAFFGEGKETNRDESFYGDFVLAYDILLKVDHIYDAIRNYVTQKPYSKDKFKLYFQNPQFMGGWDKDKETDYRATILRYGSKYYLAIMDKKYAKCLQKIDKDDVNGNYEKINYKLLPGPNKMLPKVFFSKKWMAYYNPSEDIQKIYKNGTFKKGDMFNLNDCHKLIDFFKDSISRYPKWSNAYDFNFSETEKYKDIAGFYREVEEQGYKVSFESASKKEVDKLVEEGKLYMFQIYNKDFSDKSHGTPNLHTMYFKLLFDENNHGQIRLSGGAELFMRRASLKKEELVVHPANSPIANKNPDNPKKTTTLSYDVYKDKRFSEDQYELHIPIAINKCPKNIFKINTEVRVLLKHDDNPYVIGIDRGERNLLYIVVVDGKGNIVEQYSLNEIINNFNGIRIKTDYHSLLDKKEKERFEARQNWTSIENIKELKAGYISQVVHKICELVEKYDAVIALEDLNSGFKNSRVKVEKQVYQKFEKMLIDKLNYMVDKKSNPCATGGALKGYQITNKFESFKSMSTQNGFIFYIPAWLTSKIDPSTGFVNLLKTKYTSIADSKKFISSFDRIMYVPEEDLFEFALDYKNFSRTDADYIKKWKLYSYGNRIRIFRNPKKNNVFDWEEVCLTSAYKELFNKYGINYQQGDIRALLCEQSDKAFYSSFMALMSLMLQMRNSITGRTDVDFLISPVKNSDGIFYDSRNYEAQENAILPKNADANGAYNIARKVLWAIGQFKKAEDEKLDKVKIAISNKEWLEYAQTSVKH

SEQ ID NO: 339 - protein, 1375 aa, Synthetic construct
MGSKLEKFTNCYSLSKTLRFKAIPVGKTQENIDNKRLLVEDEKRAEDYKGVKKLLDRYYLSFINDVLHSIKLKNLNNYISLFRKKTRTEKENKELENLEINLRKEIAKAFKGNEGYKSLFKKDIIETILPEFLDDKDEIALVNSFNGFTTAFTGFFDNRENMFSEEAKSTSIAFRCINENLTRYISNMDIFEKVDAIFDKHEVQEIKEKILNSDYDVEDFFEGEFFNFVLTQEGIDVYNAIIGGFVTESGEKIKGLNEYINLYNQKTKQKLPKFKPLYKQVLSDRESLSFYGSGENQTTQKGQKNSRERMKRIEEGIKELGSQILKEHPVENTQLQNEKLYLYYLQNGRDMYVDQELDINRLSDYDVDHIVPQSFLKDDSIDNKVLTRSDKNRGKSDNVPSEEVVKKMKNYWRQLLNAKLITQRKFDNLTKAERGGLSEGYTSDEEVLEVFRNTLNKNSEIFSSIKKLEKLFKNFDEYSSAGIFVKNGPAISTISKDIFGEWNVIRDKWNAEYDDIHLKKKAVVTEKYEDDRRKSFKKIGSFSLEQLQEYADADLSVVEKLKEIIIQKVDEIYKVYGSSEKLFDADFVLEKSLKKNDAVVAIMKDLLDSVKSFENYIKAFFGEGKETNRDESFYGDFVLAYDILLKVDHIYDAIRNYVTQKPYSKDKFKLYFQNPQFMGGWDKDKETDYRATILRYGSKYYLAIMDKKYAKCLQKIDKDDVNGNYEKINYKLLPGPNKMLPKVFFSKKWMAYYNPSEDIQKIYKNGTFKKGDMFNLNDCHKLIDFFKDSISRYPKWSNAYDFNFSETEKYKDIAGFYREVEEQGYKVSFESASKKEVDKLVEEGKLYMFQIYNKDFSDKSHGTPNLHTMYFKLLFDENNHGQIRLSGGAELFMRRASLKKEELVVHPANSPIANKNPDNPKKTTTLSYDVYKDKRFSEDQYELHIPIAINKCPKNIFKINTEVRVLLKHDDNPYVIGIDRGERNLLYIVVVDGKGNIVEQYSLNEIINNFNGIRIKTDYHSLLDKKEKERFEARQNWTSIENIKELKAGYISQVVHKICELVEKYDAVIALEDLNSGFKNSRVKVEKQVYQKFEKMLIDKLNYMVDKKSNPCATGGALKGYQITNKFESFKSMSTQNGFIFYIPAWLTSKIDPSTGFVNLLKTKYTSIADSKKFISSFDRIMYVPEEDLFEFALDYKNFSRTDADYIKKWKLYSYGNRIRIFRNPKKNNVFDWEEVCLTSAYKELFNKYGINYQQGDIRALLCEQSDKAFYSSFMALMSLMLQMRNSITGRTDVDFLISPVKNSDGIFYDSRNYEAQENAILPKNADANGAYNIARKVLWAIGQFKKAEDEKLDKVKIAISNKEWLEYAQTSVKH

SEQ ID NO: 340 - protein, 1377 aa, Synthetic construct
MGSKLEKFTNCYSLSKTLRFKAIPVGKTQENIDNKRLLVEDEKRAEDYKGVKKLLDRYYLSFINDVLHSIKLKNLNNYISLFRKKTRTEKENKELENLEINLRKEIAKAFKGNEGYKSLFKKDIIETILPEFLDDKDEIALVNSFNGFTTAFTGFFDNRENMFSEEAKSTSIAFRCINENLTRYISNMDIFEKVDAIFDKHEVQEIKEKILNSDYDVEDFFEGEFFNFVLTQEGIDVYNAIIGGFVTESGEKIKGLNEYINLYNQKTKQKLPKFKPLYKQVLSDRESLSFYGGSSGENQTTQKGQKNSRERMKRIEEGIKELGSQILKEHPVENTQLQNEKLYLYYLQNGRDMYVDQELDINRLSDYDVDHIVPQSFLKDDSIDNKVLTRSDKNRGKSDNVPSEEVVKKMKNYWRQLLNAKLITQRKFDNLTKAERGGLSEGYTSDEEVLEVFRNTLNKNSEIFSSIKKLEKLFKNFDEYSSAGIFVKNGPAISTISKDIFGEWNVIRDKWNAEYDDIHLKKKAVVTEKYEDDRRKSFKKIGSFSLEQLQEYADADLSVVEKLKEIIIQKVDEIYKVYGSSEKLFDADFVLEKSLKKNDAVVAIMKDLLDSVKSFENYIKAFFGEGKETNRDESFYGDFVLAYDILLKVDHIYDAIRNYVTQKPYSKDKFKLYFQNPQFMGGWDKDKETDYRATILRYGSKYYLAIMDKKYAKCLQKIDKDDVNGNYEKINYKLLPGPNKMLPKVFFSKKWMAYYNPSEDIQKIYKNGTFKKGDMFNLNDCHKLIDFFKDSISRYPKWSNAYDFNFSETEKYKDIAGFYREVEEQGYKVSFESASKKEVDKLVEEGKLYMFQIYNKDFSDKSHGTPNLHTMYFKLLFDENNHGQIRLSGGAELFMRRASLKKEELVVHPANSPIANKNPDNPKKTTTLSYDVYKDKRFSEDQYELHIPIAINKCPKNIFKINTEVRVLLKHDDNPYVIGIDRGERNLLYIVVVDGKGNIVEQYSLNEIINNFNGIRIKTDYHSLLDKKEKERFEARQNWTSIENIKELKAGYISQVVHKICELVEKYDAVIALEDLNSGFKNSRVKVEKQVYQKFEKMLIDKLNYMVDKKSNPCATGGALKGYQITNKFESFKSMSTQNGFIFYIPAWLTSKIDPSTGFVNLLKTKYTSIADSKKFISSFDRIMYVPEEDLFEFALDYKNFSRTDADYIKKWKLYSYGNRIRIFRNPKKNNVFDWEEVCLTSAYKELFNKYGINYQQGDIRALLCEQSDKAFYSSFMALMSLMLQMRNSITGRTDVDFLISPVKNSDGIFYDSRNYEAQENAILPKNADANGAYNIARKVLWAIGQFKKAEDEKLDKVKIAISNKEWLEYAQTSVKH

SEQ ID NO: 341 - protein, 1379 aa, Synthetic construct
MGSKLEKFTNCYSLSKTLRFKAIPVGKTQENIDNKRLLVEDEKRAEDYKGVKKLLDRYYLSFINDVLHSIKLKNLNNYISLFRKKTRTEKENKELENLEINLRKEIAKAFKGNEGYKSLFKKDIIETILPEFLDDKDEIALVNSFNGFTTAFTGFFDNRENMFSEEAKSTSIAFRCINENLTRYISNMDIFEKVDAIFDKHEVQEIKEKILNSDYDVEDFFEGEFFNFVLTQEGIDVYNAIIGGFVTESGEKIKGLNEYINLYNQKTKQKLPKFKPLYKQVLSDRESLSFYGGSSGENQTTQKGQKNSRERMKRIEEGIKELGSQILKEHPVENTQLQNEKLYLYYLQNGRDMYVDQELDINRLSDYDVDHIVPQSFLKDDSIDNKVLTRSDKNRGKSDNVPSEEVVKKMKNYWRQLLNAKLITQRKFDNLTKAERGGLSGSEGYTSDEEVLEVFRNTLNKNSEIFSSIKKLEKLFKNFDEYSSAGIFVKNGPAISTISKDIFGEWNVIRDKWNAEYDDIHLKKKAVVTEKYEDDRRKSFKKIGSFSLEQLQEYADADLSVVEKLKEIIIQKVDEIYKVYGSSEKLFDADFVLEKSLKKNDAVVAIMKDLLDSVKSFENYIKAFFGEGKETNRDESFYGDFVLAYDILLKVDHIYDAIRNYVTQKPYSKDKFKLYFQNPQFMGGWDKDKETDYRATILRYGSKYYLAIMDKKYAKCLQKIDKDDVNGNYEKINYKLLPGPNKMLPKVFFSKKWMAYYNPSEDIQKIYKNGTFKKGDMFNLNDCHKLIDFFKDSISRYPKWSNAYDFNFSETEKYKDIAGFYREVEEQGYKVSFESASKKEVDKLVEEGKLYMFQIYNKDFSDKSHGTPNLHTMYFKLLFDENNHGQIRLSGGAELFMRRASLKKEELVVHPANSPIANKNPDNPKKTTTLSYDVYKDKRFSEDQYELHIPIAINKCPKNIFKINTEVRVLLKHDDNPYVIGIDRGERNLLYIVVVDGKGNIVEQYSLNEIINNFNGIRIKTDYHSLLDKKEKERFEARQNWTSIENIKELKAGYISQVVHKICELVEKYDAVIALEDLNSGFKNSRVKVEKQVYQKFEKMLIDKLNYMVDKKSNPCATGGALKGYQITNKFESFKSMSTQNGFIFYIPAWLTSKIDPSTGFVNLLKTKYTSIADSKKFISSFDRIMYVPEEDLFEFALDYKNFSRTDADYIKKWKLYSYGNRIRIFRNPKKNNVFDWEEVCLTSAYKELFNKYGINYQQGDIRALLCEQSDKAFYSSFMALMSLMLQMRNSITGRTDVDFLISPVKNSDGIFYDSRNYEAQENAILPKNADANGAYNIARKVLWAIGQFKKAEDEKLDKVKIAISNKEWLEYAQTSVKH

SEQ ID NO: 342 - protein, 1373 aa, Synthetic construct
MGSKLEKFTNCYSLSKTLRFKAIPVGKTQENIDNKRLLVEDEKRAEDYKGVKKLLDRYYLSFINDVLHSIKLKNLNNYISLFRKKTRTEKENKELENLEINLRKEIAKAFKGNEGYKSLFKKDIIETILPEFLDDKDEIALVNSFNGFTTAFTGFFDNRENMFSEEAKSTSIAFRCINENLTRYISNMDIFEKVDAIFDKHEVQEIKEKILNSDYDVEDFFEGEFFNFVLTQEGIDVYNAIIGGFVTESGEKIKGLNEYINLYNQKTKQKLPKFKPLYKQVLSDRESLSFYGEENQTTQKGQKNSRERMKRIEEGIKELGSQILKEHPVENTQLQNEKLYLYYLQNGRDMYVDQELDINRLSDYDVDHIVPQSFLKDDSIDNKVLTRSDKNRGKSDNVPSEEVVKKMKNYWRQLLNAKLITQRKFDNLTKAERGGLSGYTSDEEVLEVFRNTLNKNSEIFSSIKKLEKLFKNFDEYSSAGIFVKNGPAISTISKDIFGEWNVIRDKWNAEYDDIHLKKKAVVTEKYEDDRRKSFKKIGSFSLEQLQEYADADLSVVEKLKEIIIQKVDEIYKVYGSSEKLFDADFVLEKSLKKNDAVVAIMKDLLDSVKSFENYIKAFFGEGKETNRDESFYGDFVLAYDILLKVDHIYDAIRNYVTQKPYSKDKFKLYFQNPQFMGGWDKDKETDYRATILRYGSKYYLAIMDKKYAKCLQKIDKDDVNGNYEKINYKLLPGPNKMLPKVFFSKKWMAYYNPSEDIQKIYKNGTFKKGDMFNLNDCHKLIDFFKDSISRYPKWSNAYDFNFSETEKYKDIAGFYREVEEQGYKVSFESASKKEVDKLVEEGKLYMFQIYNKDFSDKSHGTPNLHTMYFKLLFDENNHGQIRLSGGAELFMRRASLKKEELVVHPANSPIANKNPDNPKKTTTLSYDVYKDKRFSEDQYELHIPIAINKCPKNIFKINTEVRVLLKHDDNPYVIGIDRGERNLLYIVVVDGKGNIVEQYSLNEIINNFNGIRIKTDYHSLLDKKEKERFEARQNWTSIENIKELKAGYISQVVHKICELVEKYDAVIALEDLNSGFKNSRVKVEKQVYQKFEKMLIDKLNYMVDKKSNPCATGGALKGYQITNKFESFKSMSTQNGFIFYIPAWLTSKIDPSTGFVNLLKTKYTSIADSKKFISSFDRIMYVPEEDLFEFALDYKNFSRTDADYIKKWKLYSYGNRIRIFRNPKKNNVFDWEEVCLTSAYKELFNKYGINYQQGDIRALLCEQSDKAFYSSFMALMSLMLQMRNSITGRTDVDFLISPVKNSDGIFYDSRNYEAQENAILPKNADANGAYNIARKVLWAIGQFKKAEDEKLDKVKIAISNKEWLEYAQTSVKH

SEQ ID NO: 343 - protein, 1375 aa, Synthetic construct
MGSKLEKFTNCYSLSKTLRFKAIPVGKTQENIDNKRLLVEDEKRAEDYKGVKKLLDRYYLSFINDVLHSIKLKNLNNYISLFRKKTRTEKENKELENLEINLRKEIAKAFKGNEGYKSLFKKDIIETILPEFLDDKDEIALVNSFNGFTTAFTGFFDNRENMFSEEAKSTSIAFRCINENLTRYISNMDIFEKVDAIFDKHEVQEIKEKILNSDYDVEDFFEGEFFNFVLTQEGIDVYNAIIGGFVTESGEKIKGLNEYINLYNQKTKQKLPKFKPLYKQVLSDRESLSFYGEGSENQTTQKGQKNSRERMKRIEEGIKELGSQILKEHPVENTQLQNEKLYLYYLQNGRDMYVDQELDINRLSDYDVDHIVPQSFLKDDSIDNKVLTRSDKNRGKSDNVPSEEVVKKMKNYWRQLLNAKLITQRKFDNLTKAERGGLSGYTSDEEVLEVFRNTLNKNSEIFSSIKKLEKLFKNFDEYSSAGIFVKNGPAISTISKDIFGEWNVIRDKWNAEYDDIHLKKKAVVTEKYEDDRRKSFKKIGSFSLEQLQEYADADLSVVEKLKEIIIQKVDEIYKVYGSSEKLFDADFVLEKSLKKNDAVVAIMKDLLDSVKSFENYIKAFFGEGKETNRDESFYGDFVLAYDILLKVDHIYDAIRNYVTQKPYSKDKFKLYFQNPQFMGGWDKDKETDYRATILRYGSKYYLAIMDKKYAKCLQKIDKDDVNGNYEKINYKLLPGPNKMLPKVFFSKKWMAYYNPSEDIQKIYKNGTFKKGDMFNLNDCHKLIDFFKDSISRYPKWSNAYDFNFSETEKYKDIAGFYREVEEQGYKVSFESASKKEVDKLVEEGKLYMFQIYNKDFSDKSHGTPNLHTMYFKLLFDENNHGQIRLSGGAELFMRRASLKKEELVVHPANSPIANKNPDNPKKTTTLSYDVYKDKRFSEDQYELHIPIAINKCPKNIFKINTEVRVLLKHDDNPYVIGIDRGERNLLYIVVVDGKGNIVEQYSLNEIINNFNGIRIKTDYHSLLDKKEKERFEARQNWTSIENIKELKAGYISQVVHKICELVEKYDAVIALEDLNSGFKNSRVKVEKQVYQKFEKMLIDKLNYMVDKKSNPCATGGALKGYQITNKFESFKSMSTQNGFIFYIPAWLTSKIDPSTGFVNLLKTKYTSIADSKKFISSFDRIMYVPEEDLFEFALDYKNFSRTDADYIKKWKLYSYGNRIRIFRNPKKNNVFDWEEVCLTSAYKELFNKYGINYQQGDIRALLCEQSDKAFYSSFMALMSLMLQMRNSITGRTDVDFLISPVKNSDGIFYDSRNYEAQENAILPKNADANGAYNIARKVLWAIGQFKKAEDEKLDKVKIAISNKEWLEYAQTSVKH

SEQ ID NO: 344 - protein, 1377 aa, Synthetic construct
MGSKLEKFTNCYSLSKTLRFKAIPVGKTQENIDNKRLLVEDEKRAEDYKGVKKLLDRYYLSFINDVLHSIKLKNLNNYISLFRKKTRTEKENKELENLEINLRKEIAKAFKGNEGYKSLFKKDIIETILPEFLDDKDEIALVNSFNGFTTAFTGFFDNRENMFSEEAKSTSIAFRCINENLTRYISNMDIFEKVDAIFDKHEVQEIKEKILNSDYDVEDFFEGEFFNFVLTQEGIDVYNAIIGGFVTESGEKIKGLNEYINLYNQKTKQKLPKFKPLYKQVLSDRESLSFYGEGSSGENQTTQKGQKNSRERMKRIEEGIKELGSQILKEHPVENTQLQNEKLYLYYLQNGRDMYVDQELDINRLSDYDVDHIVPQSFLKDDSIDNKVLTRSDKNRGKSDNVPSEEVVKKMKNYWRQLLNAKLITQRKFDNLTKAERGGLSGYTSDEEVLEVFRNTLNKNSEIFSSIKKLEKLFKNFDEYSSAGIFVKNGPAISTISKDIFGEWNVIRDKWNAEYDDIHLKKKAVVTEKYEDDRRKSFKKIGSFSLEQLQEYADADLSVVEKLKEIIIQKVDEIYKVYGSSEKLFDADFVLEKSLKKNDAVVAIMKDLLDSVKSFENYIKAFFGEGKETNRDESFYGDFVLAYDILLKVDHIYDAIRNYVTQKPYSKDKFKLYFQNPQFMGGWDKDKETDYRATILRYGSKYYLAIMDKKYAKCLQKIDKDDVNGNYEKINYKLLPGPNKMLPKVFFSKKWMAYYNPSEDIQKIYKNGTFKKGDMFNLNDCHKLIDFFKDSISRYPKWSNAYDFNFSETEKYKDIAGFYREVEEQGYKVSFESASKKEVDKLVEEGKLYMFQIYNKDFSDKSHGTPNLHTMYFKLLFDENNHGQIRLSGGAELFMRRASLKKEELVVHPANSPIANKNPDNPKKTTTLSYDVYKDKRFSEDQYELHIPIAINKCPKNIFKINTEVRVLLKHDDNPYVIGIDRGERNLLYIVVVDGKGNIVEQYSLNEIINNFNGIRIKTDYHSLLDKKEKERFEARQNWTSIENIKELKAGYISQVVHKICELVEKYDAVIALEDLNSGFKNSRVKVEKQVYQKFEKMLIDKLNYMVDKKSNPCATGGALKGYQITNKFESFKSMSTQNGFIFYIPAWLTSKIDPSTGFVNLLKTKYTSIADSKKFISSFDRIMYVPEEDLFEFALDYKNFSRTDADYIKKWKLYSYGNRIRIFRNPKKNNVFDWEEVCLTSAYKELFNKYGINYQQGDIRALLCEQSDKAFYSSFMALMSLMLQMRNSITGRTDVDFLISPVKNSDGIFYDSRNYEAQENAILPKNADANGAYNIARKVLWAIGQFKKAEDEKLDKVKIAISNKEWLEYAQTSVKH

SEQ ID NO: 345 - protein, 1379 aa, Synthetic construct
MGSKLEKFTNCYSLSKTLRFKAIPVGKTQENIDNKRLLVEDEKRAEDYKGVKKLLDRYYLSFINDVLHSIKLKNLNNYISLFRKKTRTEKENKELENLEINLRKEIAKAFKGNEGYKSLFKKDIIETILPEFLDDKDEIALVNSFNGFTTAFTGFFDNRENMFSEEAKSTSIAFRCINENLTRYISNMDIFEKVDAIFDKHEVQEIKEKILNSDYDVEDFFEGEFFNFVLTQEGIDVYNAIIGGFVTESGEKIKGLNEYINLYNQKTKQKLPKFKPLYKQVLSDRESLSFYGEGSSGENQTTQKGQKNSRERMKRIEEGIKELGSQILKEHPVENTQLQNEKLYLYYLQNGRDMYVDQELDINRLSDYDVDHIVPQSFLKDDSIDNKVLTRSDKNRGKSDNVPSEEVVKKMKNYWRQLLNAKLITQRKFDNLTKAERGGLSGSGYTSDEEVLEVFRNTLNKNSEIFSSIKKLEKLFKNFDEYSSAGIFVKNGPAISTISKDIFGEWNVIRDKWNAEYDDIHLKKKAVVTEKYEDDRRKSFKKIGSFSLEQLQEYADADLSVVEKLKEIIIQKVDEIYKVYGSSEKLFDADFVLEKSLKKNDAVVAIMKDLLDSVKSFENYIKAFFGEGKETNRDESFYGDFVLAYDILLKVDHIYDAIRNYVTQKPYSKDKFKLYFQNPQFMGGWDKDKETDYRATILRYGSKYYLAIMDKKYAKCLQKIDKDDVNGNYEKINYKLLPGPNKMLPKVFFSKKWMAYYNPSEDIQKIYKNGTFKKGDMFNLNDCHKLIDFFKDSISRYPKWSNAYDFNFSETEKYKDIAGFYREVEEQGYKVSFESASKKEVDKLVEEGKLYMFQIYNKDFSDKSHGTPNLHTMYFKLLFDENNHGQIRLSGGAELFMRRASLKKEELVVHPANSPIANKNPDNPKKTTTLSYDVYKDKRFSEDQYELHIPIAINKCPKNIFKINTEVRVLLKHDDNPYVIGIDRGERNLLYIVVVDGKGNIVEQYSLNEIINNFNGIRIKTDYHSLLDKKEKERFEARQNWTSIENIKELKAGYISQVVHKICELVEKYDAVIALEDLNSGFKNSRVKVEKQVYQKFEKMLIDKLNYMVDKKSNPCATGGALKGYQITNKFESFKSMSTQNGFIFYIPAWLTSKIDPSTGFVNLLKTKYTSIADSKKFISSFDRIMYVPEEDLFEFALDYKNFSRTDADYIKKWKLYSYGNRIRIFRNPKKNNVFDWEEVCLTSAYKELFNKYGINYQQGDIRALLCEQSDKAFYSSFMALMSLMLQMRNSITGRTDVDFLISPVKNSDGIFYDSRNYEAQENAILPKNADANGAYNIARKVLWAIGQFKKAEDEKLDKVKIAISNKEWLEYAQTSVKH

SEQ ID NO: 346 - protein, 1376 aa, Synthetic construct
MSKLEKFTNCYSLSKTLRFKAIPVGKTQENIDNKRLLVEDEKRAEDYKGVKKLLDRYYLSFINDVLHSIKLKNLNNYISLFRKKTRTEKENKELENLEINLRKEIAKAFKGNEGYKSLFKKDIIETILPEFLDDKDEIALVNSFNGFTTAFTGFFDNRENMFSEEAKSTSIAFRCINENLTRYISNMDIFEKVDAIFDKHEVQEIKEKILNSDYDVEDFFEGEFFNFVLTQEGIDVYNAIIGGFVTESGEKIKGLNEYINLYNQKTKQKLPKFKPLYKQVLSDRESLSFYGEGSSGENQTTQKGQKNSRERMKRIEEGIKELGSQILKEHPVENTQLQNEKLYLYYLQNGRDMYVDQELDINRLSDYDVDHIVPQSFLKDDSIDNKVLTRSDKNRGKSDNVPSEEVVKKMKNYWRQLLNAKLITQRKFDNLTKAERGGLSGYTSDEEVLEVFRNTLNKNSEIFSSIKKLEKLFKNFDEYSSAGIFVKNGPAISTISKDIFGEWNVIRDKWNAEYDDIHLKKKAVVTEKYEDDRRKSFKKIGSFSLEQLQEYADADLSVVEKLKEIIIQKVDEIYKVYGSSEKLFDADFVLEKSLKKNDAVVAIMKDLLDSVKSFENYIKAFFGEGKETNRDESFYGDFVLAYDILLKVDHIYDAIRNYVTQKPYSKDKFKLYFQNPQFMRGWDKDKETDYRATILRYGSKYYLAIMDKKYAKCLQKIDKDDVNGNYEKINYKLLPGPNKMLPRVFFSKKWMAYYNPSEDIQKIYKNGTFKKGDMFNLNDCHKLIDFFKDSISRYPKWSNAYDFNFSETEKYKDIAGFYREVEEQGYKVSFESASKKEVDKLVEEGKLYMFQIYNKDFSDKSHGTPNLHTMYFKLLFDENNHGQIRLSGGAELFMRRASLKKEELVVHPANSPIANKNPDNPKKTTTLSYDVYKDKRFSEDQYELHIPIAINKCPKNIFKINTEVRVLLKHDDNPYVIGIDRGERNLLYIVVVDGKGNIVEQYSLNEIINNFNGIRIKTDYHSLLDKKEKERFEARQNWTSIENIKELKAGYISQVVHKICELVEKYDAVIALEDLNSGFKNSRVKVEKQVYQKFEKMLIDKLNYMVDKKSNPCATGGALKGYQITNKFESFKSMSTQNGFIFYIPAWLTSKIDPSTGFVNLLKTKYTSIADSKKFISSFDRIMYVPEEDLFEFALDYKNFSRTDADYIKKWKLYSYGNRIRIFRNPKKNNVFDWEEVCLTSAYKELFNKYGINYQQGDIRALLCEQSDKAFYSSFMALMSLMLQMRNSITGRTDVDFLISPVKNSDGIFYDSRNYEAQENAILPKNADANGAYNIARKVLWAIGQFKKAEDEKLDKVKIAISNKEWLEYAQTSVKH

SEQ ID NO: 347 - protein, 1376 aa, Synthetic construct
MSKLEKFTNCYSLSKTLRFKAIPVGKTQENIDNKRLLVEDEKRAEDYKGVKKLLDRYYLSFINDVLHSIKLKNLNNYISLFRKKTRTEKENKELENLEINLRKEIAKAFKGNEGYKSLFKKDIIETILPEFLDDKDEIALVNSFNGFTTAFTGFFDNRENMFSEEAKSTSIAFRCINENLTRYISNMDIFEKVDAIFDKHEVQEIKEKILNSDYDVEDFFEGEFFNFVLTQEGIDVYNAIIGGFVTESGEKIKGLNEYINLYNQKTKQKLPKFKPLYKQVLSDRESLSFYGEGSSGENQTTQKGQKNSRERMKRIEEGIKELGSQILKEHPVENTQLQNEKLYLYYLQNGRDMYVDQELDINRLSDYDVDHIVPQSFLKDDSIDNKVLTRSDKNRGKSDNVPSEEVVKKMKNYWRQLLNAKLITQRKFDNLTKAERGGLSGYTSDEEVLEVFRNTLNKNSEIFSSIKKLEKLFKNFDEYSSAGIFVKNGPAISTISKDIFGEWNVIRDKWNAEYDDIHLKKKAVVTEKYEDDRRKSFKKIGSFSLEQLQEYADADLSVVEKLKEIIIQKVDEIYKVYGSSEKLFDADFVLEKSLKKNDAVVAIMKDLLDSVKSFENYIKAFFGEGKETNRDESFYGDFVLAYDILLKVDHIYDAIRNYVTQKPYSKDKFKLYFQNPQFMRGWDKDVETDRRATILRYGSKYYLAIMDKKYAKCLQKIDKDDVNGNYEKINYKLLPGPNKMLPKVFFSKKWMAYYNPSEDIQKIYKNGTFKKGDMFNLNDCHKLIDFFKDSISRYPKWSNAYDFNFSETEKYKDIAGFYREVEEQGYKVSFESASKKEVDKLVEEGKLYMFQIYNKDFSDKSHGTPNLHTMYFKLLFDENNHGQIRLSGGAELFMRRASLKKEELVVHPANSPIANKNPDNPKKTTTLSYDVYKDKRFSEDQYELHIPIAINKCPKNIFKINTEVRVLLKHDDNPYVIGIDRGERNLLYIVVVDGKGNIVEQYSLNEIINNFNGIRIKTDYHSLLDKKEKERFEARQNWTSIENIKELKAGYISQVVHKICELVEKYDAVIALEDLNSGFKNSRVKVEKQVYQKFEKMLIDKLNYMVDKKSNPCATGGALKGYQITNKFESFKSMSTQNGFIFYIPAWLTSKIDPSTGFVNLLKTKYTSIADSKKFISSFDRIMYVPEEDLFEFALDYKNFSRTDADYIKKWKLYSYGNRIRIFRNPKKNNVFDWEEVCLTSAYKELFNKYGINYQQGDIRALLCEQSDKAFYSSFMALMSLMLQMRNSITGRTDVDFLISPVKNSDGIFYDSRNYEAQENAILPKNADANGAYNIARKVLWAIGQFKKAEDEKLDKVKIAISNKEWLEYAQTSVKH

SEQ ID NO: 348 - protein, 1376 aa, Synthetic construct
MSKLEKFTNCYSLSKTLRFKAIPVGKTQENIDNKRLLVEDEKRAEDYKGVKKLLDRYYLSFINDVLHSIKLKNLNNYISLFRKKTRTEKENKELENLEINLRKEIAKAFKGNEGYKSLFKKDIIETILPEFLDDKDEIALVNSFNGFTTAFTGFFRNRENMFSEEAKSTSIAFRCINENLTRYISNMDIFEKVDAIFDKHEVQEIKEKILNSDYDVEDFFEGEFFNFVLTQEGIDVYNAIIGGFVTESGEKIKGLNEYINLYNQKTKQKLPKFKPLYKQVLSDRESLSFYGEGSSGENQTTQKGQKNSRERMKRIEEGIKELGSQILKEHPVENTQLQNEKLYLYYLQNGRDMYVDQELDINRLSDYDVDHIVPQSFLKDDSIDNKVLTRSDKNRGKSDNVPSEEVVKKMKNYWRQLLNAKLITQRKFDNLTKAERGGLSGYTSDEEVLEVFRNTLNKNSEIFSSIKKLEKLFKNFDEYSSAGIFVKNGPAISTISKDIFGEWNVIRDKWNAEYDDIHLKKKAVVTEKYEDDRRKSFKKIGSFSLEQLQEYADADLSVVEKLKEIIIQKVDEIYKVYGSSEKLFDADFVLEKSLKKNDAVVAIMKDLLDSVKSFENYIKAFFGEGKETNRDESFYGDFVLAYDILLKVDHIYDAIRNYVTQKPYSKDKFKLYFQNPQFMGGWDKDKETDYRATILRYGSKYYLAIMDKKYAKCLQKIDKDDVNGNYEKINYKLLPGPNKMLPKVFFSKKWMAYYNPSEDIQKIYKNGTFKKGDMFNLNDCHKLIDFFKDSISRYPKWSNAYDFNFSETEKYKDIAGFYREVEEQGYKVSFESASKKEVDKLVEEGKLYMFQIYNKDFSDKSHGTPNLHTMYFKLLFDENNHGQIRLSGGAELFMRRASLKKEELVVHPANSPIANKNPDNPKKTTTLSYDVYKDKRFSEDQYELHIPIAINKCPKNIFKINTEVRVLLKHDDNPYVIGIDRGERNLLYIVVVDGKGNIVEQYSLNEIINNFNGIRIKTDYHSLLDKKEKERFEARQNWTSIENIKELKAGYISQVVHKICELVEKYDAVIALEDLNSGFKNSRVKVEKQVYQKFEKMLIDKLNYMVDKKSNPCATGGALKGYQITNKFESFKSMSTQNGFIFYIPAWLTSKIDPSTGFVNLLKTKYTSIADSKKFISSFDRIMYVPEEDLFEFALDYKNFSRTDADYIKKWKLYSYGNRIRIFRNPKKNNVFDWEEVCLTSAYKELFNKYGINYQQGDIRALLCEQSDKAFYSSFMALMSLMLQMRNSITGRTDVDFLISPVKNSDGIFYDSRNYEAQENAILPKNADANGAYNIARKVLWAIGQFKKAEDEKLDKVKIAISNKEWLEYAQTSVKH

SEQ ID NO: 349 - protein, 1372 aa, Synthetic construct
MSKLEKFTNCYSLSKTLRFKAIPVGKTQENIDNKRLLVEDEKRAEDYKGVKKLLDRYYLSFINDVLHSIKLKNLNNYISLFRKKTRTEKENKELENLEINLRKEIAKAFKGNEGYKSLFKKDIIETILPEFLDDKDEIALVNSFNGFTTAFTGFFDNRENMFSEEAKSTSIAFRCINENLTRYISNMDIFEKVDAIFDKHEVQEIKEKILNSDYDVEDFFEGEFFNFVLTQEGIDVYNAIIGGFVTESGEKIKGLNEYINLYNQKTKQKLPKFKPLYKQVLSDRESLSFYGENQTTQKGQKNSRERMKRIEEGIKELGSQILKEHPVENTQLQNEKLYLYYLQNGRDMYVDQELDINRLSDYDVDHIVPQSFLKDDSIDNKVLTRSDKNRGKSDNVPSEEVVKKMKNYWRQLLNAKLITQRKFDNLTKAERGGLSEGYTSDEEVLEVFRNTLNKNSEIFSSIKKLEKLFKNFDEYSSAGIFVKNGPAISTISKDIFGEWNVIRDKWNAEYDDIHLKKKAVVTEKYEDDRRKSFKKIGSFSLEQLQEYADADLSVVEKLKEIIIQKVDEIYKVYGSSEKLFDADFVLEKSLKKNDAVVAIMKDLLDSVKSFENYIKAFFGEGKETNRDESFYGDFVLAYDILLKVDHIYDAIRNYVTQKPYSKDKFKLYFQNPQFMRGWDKDKETDYRATILRYGSKYYLAIMDKKYAKCLQKIDKDDVNGNYEKINYKLLPGPNKMLPRVFFSKKWMAYYNPSEDIQKIYKNGTFKKGDMFNLNDCHKLIDFFKDSISRYPKWSNAYDFNFSETEKYKDIAGFYREVEEQGYKVSFESASKKEVDKLVEEGKLYMFQIYNKDFSDKSHGTPNLHTMYFKLLFDENNHGQIRLSGGAELFMRRASLKKEELVVHPANSPIANKNPDNPKKTTTLSYDVYKDKRFSEDQYELHIPIAINKCPKNIFKINTEVRVLLKHDDNPYVIGIDRGERNLLYIVVVDGKGNIVEQYSLNEIINNFNGIRIKTDYHSLLDKKEKERFEARQNWTSIENIKELKAGYISQVVHKICELVEKYDAVIALEDLNSGFKNSRVKVEKQVYQKFEKMLIDKLNYMVDKKSNPCATGGALKGYQITNKFESFKSMSTQNGFIFYIPAWLTSKIDPSTGFVNLLKTKYTSIADSKKFISSFDRIMYVPEEDLFEFALDYKNFSRTDADYIKKWKLYSYGNRIRIFRNPKKNNVFDWEEVCLTSAYKELFNKYGINYQQGDIRALLCEQSDKAFYSSFMALMSLMLQMRNSITGRTDVDFLISPVKNSDGIFYDSRNYEAQENAILPKNADANGAYNIARKVLWAIGQFKKAEDEKLDKVKIAISNKEWLEYAQTSVKH

SEQ ID NO: 350 - protein, 1372 aa, Synthetic construct
MSKLEKFTNCYSLSKTLRFKAIPVGKTQENIDNKRLLVEDEKRAEDYKGVKKLLDRYYLSFINDVLHSIKLKNLNNYISLFRKKTRTEKENKELENLEINLRKEIAKAFKGNEGYKSLFKKDIIETILPEFLDDKDEIALVNSFNGFTTAFTGFFDNRENMFSEEAKSTSIAFRCINENLTRYISNMDIFEKVDAIFDKHEVQEIKEKILNSDYDVEDFFEGEFFNFVLTQEGIDVYNAIIGGFVTESGEKIKGLNEYINLYNQKTKQKLPKFKPLYKQVLSDRESLSFYGENQTTQKGQKNSRERMKRIEEGIKELGSQILKEHPVENTQLQNEKLYLYYLQNGRDMYVDQELDINRLSDYDVDHIVPQSFLKDDSIDNKVLTRSDKNRGKSDNVPSEEVVKKMKNYWRQLLNAKLITQRKFDNLTKAERGGLSEGYTSDEEVLEVFRNTLNKNSEIFSSIKKLEKLFKNFDEYSSAGIFVKNGPAISTISKDIFGEWNVIRDKWNAEYDDIHLKKKAVVTEKYEDDRRKSFKKIGSFSLEQLQEYADADLSVVEKLKEIIIQKVDEIYKVYGSSEKLFDADFVLEKSLKKNDAVVAIMKDLLDSVKSFENYIKAFFGEGKETNRDESFYGDFVLAYDILLKVDHIYDAIRNYVTQKPYSKDKFKLYFQNPQFMRGWDKDVETDRRATILRYGSKYYLAIMDKKYAKCLQKIDKDDVNGNYEKINYKLLPGPNKMLPKVFFSKKWMAYYNPSEDIQKIYKNGTFKKGDMFNLNDCHKLIDFFKDSISRYPKWSNAYDFNFSETEKYKDIAGFYREVEEQGYKVSFESASKKEVDKLVEEGKLYMFQIYNKDFSDKSHGTPNLHTMYFKLLFDENNHGQIRLSGGAELFMRRASLKKEELVVHPANSPIANKNPDNPKKTTTLSYDVYKDKRFSEDQYELHIPIAINKCPKNIFKINTEVRVLLKHDDNPYVIGIDRGERNLLYIVVVDGKGNIVEQYSLNEIINNFNGIRIKTDYHSLLDKKEKERFEARQNWTSIENIKELKAGYISQVVHKICELVEKYDAVIALEDLNSGFKNSRVKVEKQVYQKFEKMLIDKLNYMVDKKSNPCATGGALKGYQITNKFESFKSMSTQNGFIFYIPAWLTSKIDPSTGFVNLLKTKYTSIADSKKFISSFDRIMYVPEEDLFEFALDYKNFSRTDADYIKKWKLYSYGNRIRIFRNPKKNNVFDWEEVCLTSAYKELFNKYGINYQQGDIRALLCEQSDKAFYSSFMALMSLMLQMRNSITGRTDVDFLISPVKNSDGIFYDSRNYEAQENAILPKNADANGAYNIARKVLWAIGQFKKAEDEKLDKVKIAISNKEWLEYAQTSVKH

SEQ ID NO: 351 - protein, 1372 aa, Synthetic construct
MSKLEKFTNCYSLSKTLRFKAIPVGKTQENIDNKRLLVEDEKRAEDYKGVKKLLDRYYLSFINDVLHSIKLKNLNNYISLFRKKTRTEKENKELENLEINLRKEIAKAFKGNEGYKSLFKKDIIETILPEFLDDKDEIALVNSFNGFTTAFTGFFRNRENMFSEEAKSTSIAFRCINENLTRYISNMDIFEKVDAIFDKHEVQEIKEKILNSDYDVEDFFEGEFFNFVLTQEGIDVYNAIIGGFVTESGEKIKGLNEYINLYNQKTKQKLPKFKPLYKQVLSDRESLSFYGENQTTQKGQKNSRERMKRIEEGIKELGSQILKEHPVENTQLQNEKLYLYYLQNGRDMYVDQELDINRLSDYDVDHIVPQSFLKDDSIDNKVLTRSDKNRGKSDNVPSEEVVKKMKNYWRQLLNAKLITQRKFDNLTKAERGGLSEGYTSDEEVLEVFRNTLNKNSEIFSSIKKLEKLFKNFDEYSSAGIFVKNGPAISTISKDIFGEWNVIRDKWNAEYDDIHLKKKAVVTEKYEDDRRKSFKKIGSFSLEQLQEYADADLSVVEKLKEIIIQKVDEIYKVYGSSEKLFDADFVLEKSLKKNDAVVAIMKDLLDSVKSFENYIKAFFGEGKETNRDESFYGDFVLAYDILLKVDHIYDAIRNYVTQKPYSKDKFKLYFQNPQFMGGWDKDKETDYRATILRYGSKYYLAIMDKKYAKCLQKIDKDDVNGNYEKINYKLLPGPNKMLPKVFFSKKWMAYYNPSEDIQKIYKNGTFKKGDMFNLNDCHKLIDFFKDSISRYPKWSNAYDFNFSETEKYKDIAGFYREVEEQGYKVSFESASKKEVDKLVEEGKLYMFQIYNKDFSDKSHGTPNLHTMYFKLLFDENNHGQIRLSGGAELFMRRASLKKEELVVHPANSPIANKNPDNPKKTTTLSYDVYKDKRFSEDQYELHIPIAINKCPKNIFKINTEVRVLLKHDDNPYVIGIDRGERNLLYIVVVDGKGNIVEQYSLNEIINNFNGIRIKTDYHSLLDKKEKERFEARQNWTSIENIKELKAGYISQVVHKICELVEKYDAVIALEDLNSGFKNSRVKVEKQVYQKFEKMLIDKLNYMVDKKSNPCATGGALKGYQITNKFESFKSMSTQNGFIFYIPAWLTSKIDPSTGFVNLLKTKYTSIADSKKFISSFDRIMYVPEEDLFEFALDYKNFSRTDADYIKKWKLYSYGNRIRIFRNPKKNNVFDWEEVCLTSAYKELFNKYGINYQQGDIRALLCEQSDKAFYSSFMALMSLMLQMRNSITGRTDVDFLISPVKNSDGIFYDSRNYEAQENAILPKNADANGAYNIARKVLWAIGQFKKAEDEKLDKVKIAISNKEWLEYAQTSVKH

SEQ ID NO: 352 - protein, 1374 aa, Synthetic construct
MSKLEKFTNCYSLSKTLRFKAIPVGKTQENIDNKRLLVEDEKRAEDYKGVKKLLDRYYLSFINDVLHSIKLKNLNNYISLFRKKTRTEKENKELENLEINLRKEIAKAFKGNEGYKSLFKKDIIETILPEFLDDKDEIALVNSFNGFTTAFTGFFDNRENMFSEEAKSTSIAFRCINENLTRYISNMDIFEKVDAIFDKHEVQEIKEKILNSDYDVEDFFEGEFFNFVLTQEGIDVYNAIIGGFVTESGEKIKGLNEYINLYNQKTKQKLPKFKPLYKQVLSDRESLSFYGSGENQTTQKGQKNSRERMKRIEEGIKELGSQILKEHPVENTQLQNEKLYLYYLQNGRDMYVDQELDINRLSDYDVDHIVPQSFLKDDSIDNKVLTRSDKNRGKSDNVPSEEVVKKMKNYWRQLLNAKLITQRKFDNLTKAERGGLSEGYTSDEEVLEVFRNTLNKNSEIFSSIKKLEKLFKNFDEYSSAGIFVKNGPAISTISKDIFGEWNVIRDKWNAEYDDIHLKKKAVVTEKYEDDRRKSFKKIGSFSLEQLQEYADADLSVVEKLKEIIIQKVDEIYKVYGSSEKLFDADFVLEKSLKKNDAVVAIMKDLLDSVKSFENYIKAFFGEGKETNRDESFYGDFVLAYDILLKVDHIYDAIRNYVTQKPYSKDKFKLYFQNPQFMRGWDKDKETDYRATILRYGSKYYLAIMDKKYAKCLQKIDKDDVNGNYEKINYKLLPGPNKMLPRVFFSKKWMAYYNPSEDIQKIYKNGTFKKGDMFNLNDCHKLIDFFKDSISRYPKWSNAYDFNFSETEKYKDIAGFYREVEEQGYKVSFESASKKEVDKLVEEGKLYMFQIYNKDFSDKSHGTPNLHTMYFKLLFDENNHGQIRLSGGAELFMRRASLKKEELVVHPANSPIANKNPDNPKKTTTLSYDVYKDKRFSEDQYELHIPIAINKCPKNIFKINTEVRVLLKHDDNPYVIGIDRGERNLLYIVVVDGKGNIVEQYSLNEIINNFNGIRIKTDYHSLLDKKEKERFEARQNWTSIENIKELKAGYISQVVHKICELVEKYDAVIALEDLNSGFKNSRVKVEKQVYQKFEKMLIDKLNYMVDKKSNPCATGGALKGYQITNKFESFKSMSTQNGFIFYIPAWLTSKIDPSTGFVNLLKTKYTSIADSKKFISSFDRIMYVPEEDLFEFALDYKNFSRTDADYIKKWKLYSYGNRIRIFRNPKKNNVFDWEEVCLTSAYKELFNKYGINYQQGDIRALLCEQSDKAFYSSFMALMSLMLQMRNSITGRTDVDFLISPVKNSDGIFYDSRNYEAQENAILPKNADANGAYNIARKVLWAIGQFKKAEDEKLDKVKIAISNKEWLEYAQTSVKH

SEQ ID NO: 353 - protein, 1374 aa, Synthetic construct
MSKLEKFTNCYSLSKTLRFKAIPVGKTQENIDNKRLLVEDEKRAEDYKGVKKLLDRYYLSFINDVLHSIKLKNLNNYISLFRKKTRTEKENKELENLEINLRKEIAKAFKGNEGYKSLFKKDIIETILPEFLDDKDEIALVNSFNGFTTAFTGFFDNRENMFSEEAKSTSIAFRCINENLTRYISNMDIFEKVDAIFDKHEVQEIKEKILNSDYDVEDFFEGEFFNFVLTQEGIDVYNAIIGGFVTESGEKIKGLNEYINLYNQKTKQKLPKFKPLYKQVLSDRESLSFYGSGENQTTQKGQKNSRERMKRIEEGIKELGSQILKEHPVENTQLQNEKLYLYYLQNGRDMYVDQELDINRLSDYDVDHIVPQSFLKDDSIDNKVLTRSDKNRGKSDNVPSEEVVKKMKNYWRQLLNAKLITQRKFDNLTKAERGGLSEGYTSDEEVLEVFRNTLNKNSEIFSSIKKLEKLFKNFDEYSSAGIFVKNGPAISTISKDIFGEWNVIRDKWNAEYDDIHLKKKAVVTEKYEDDRRKSFKKIGSFSLEQLQEYADADLSVVEKLKEIIIQKVDEIYKVYGSSEKLFDADFVLEKSLKKNDAVVAIMKDLLDSVKSFENYIKAFFGEGKETNRDESFYGDFVLAYDILLKVDHIYDAIRNYVTQKPYSKDKFKLYFQNPQFMRGWDKDVETDRRATILRYGSKYYLAIMDKKYAKCLQKIDKDDVNGNYEKINYKLLPGPNKMLPKVFFSKKWMAYYNPSEDIQKIYKNGTFKKGDMFNLNDCHKLIDFFKDSISRYPKWSNAYDFNFSETEKYKDIAGFYREVEEQGYKVSFESASKKEVDKLVEEGKLYMFQIYNKDFSDKSHGTPNLHTMYFKLLFDENNHGQIRLSGGAELFMRRASLKKEELVVHPANSPIANKNPDNPKKTTTLSYDVYKDKRFSEDQYELHIPIAINKCPKNIFKINTEVRVLLKHDDNPYVIGIDRGERNLLYIVVVDGKGNIVEQYSLNEIINNFNGIRIKTDYHSLLDKKEKERFEARQNWTSIENIKELKAGYISQVVHKICELVEKYDAVIALEDLNSGFKNSRVKVEKQVYQKFEKMLIDKLNYMVDKKSNPCATGGALKGYQITNKFESFKSMSTQNGFIFYIPAWLTSKIDPSTGFVNLLKTKYTSIADSKKFISSFDRIMYVPEEDLFEFALDYKNFSRTDADYIKKWKLYSYGNRIRIFRNPKKNNVFDWEEVCLTSAYKELFNKYGINYQQGDIRALLCEQSDKAFYSSFMALMSLMLQMRNSITGRTDVDFLISPVKNSDGIFYDSRNYEAQENAILPKNADANGAYNIARKVLWAIGQFKKAEDEKLDKVKIAISNKEWLEYAQTSVKH

SEQ ID NO: 354 - protein, 1374 aa, Synthetic construct
MSKLEKFTNCYSLSKTLRFKAIPVGKTQENIDNKRLLVEDEKRAEDYKGVKKLLDRYYLSFINDVLHSIKLKNLNNYISLFRKKTRTEKENKELENLEINLRKEIAKAFKGNEGYKSLFKKDIIETILPEFLDDKDEIALVNSFNGFTTAFTGFFRNRENMFSEEAKSTSIAFRCINENLTRYISNMDIFEKVDAIFDKHEVQEIKEKILNSDYDVEDFFEGEFFNFVLTQEGIDVYNAIIGGFVTESGEKIKGLNEYINLYNQKTKQKLPKFKPLYKQVLSDRESLSFYGSGENQTTQKGQKNSRERMKRIEEGIKELGSQILKEHPVENTQLQNEKLYLYYLQNGRDMYVDQELDINRLSDYDVDHIVPQSFLKDDSIDNKVLTRSDKNRGKSDNVPSEEVVKKMKNYWRQLLNAKLITQRKFDNLTKAERGGLSEGYTSDEEVLEVFRNTLNKNSEIFSSIKKLEKLFKNFDEYSSAGIFVKNGPAISTISKDIFGEWNVIRDKWNAEYDDIHLKKKAVVTEKYEDDRRKSFKKIGSFSLEQLQEYADADLSVVEKLKEIIIQKVDEIYKVYGSSEKLFDADFVLEKSLKKNDAVVAIMKDLLDSVKSFENYIKAFFGEGKETNRDESFYGDFVLAYDILLKVDHIYDAIRNYVTQKPYSKDKFKLYFQNPQFMGGWDKDKETDYRATILRYGSKYYLAIMDKKYAKCLQKIDKDDVNGNYEKINYKLLPGPNKMLPKVFFSKKWMAYYNPSEDIQKIYKNGTFKKGDMFNLNDCHKLIDFFKDSISRYPKWSNAYDFNFSETEKYKDIAGFYREVEEQGYKVSFESASKKEVDKLVEEGKLYMFQIYNKDFSDKSHGTPNLHTMYFKLLFDENNHGQIRLSGGAELFMRRASLKKEELVVHPANSPIANKNPDNPKKTTTLSYDVYKDKRFSEDQYELHIPIAINKCPKNIFKINTEVRVLLKHDDNPYVIGIDRGERNLLYIVVVDGKGNIVEQYSLNEIINNFNGIRIKTDYHSLLDKKEKERFEARQNWTSIENIKELKAGYISQVVHKICELVEKYDAVIALEDLNSGFKNSRVKVEKQVYQKFEKMLIDKLNYMVDKKSNPCATGGALKGYQITNKFESFKSMSTQNGFIFYIPAWLTSKIDPSTGFVNLLKTKYTSIADSKKFISSFDRIMYVPEEDLFEFALDYKNFSRTDADYIKKWKLYSYGNRIRIFRNPKKNNVFDWEEVCLTSAYKELFNKYGINYQQGDIRALLCEQSDKAFYSSFMALMSLMLQMRNSITGRTDVDFLISPVKNSDGIFYDSRNYEAQENAILPKNADANGAYNIARKVLWAIGQFKKAEDEKLDKVKIAISNKEWLEYAQTSVKH

SEQ ID NO: 355 - protein, 1375 aa, Synthetic construct
SKLEKFTNCYSLSKTLRFKAIPVGKTQENIDNKRLLVEDEKRAEDYKGVKKLLDRYYLSFINDVLHSIKLKNLNNYISLFRKKTRTEKENKELENLEINLRKEIAKAFKGNEGYKSLFKKDIIETILPEFLDDKDEIALVNSFNGFTTAFTGFFDNRENMFSEEAKSTSIAFRCINENLTRYISNMDIFEKVDAIFDKHEVQEIKEKILNSDYDVEDFFEGEFFNFVLTQEGIDVYNAIIGGFVTESGEKIKGLNEYINLYNQKTKQKLPKFKPLYKQVLSDRESLSFYGEGSSGENQTTQKGQKNSRERMKRIEEGIKELGSQILKEHPVENTQLQNEKLYLYYLQNGRDMYVDQELDINRLSDYDVDHIVPQSFLKDDSIDNKVLTRSDKNRGKSDNVPSEEVVKKMKNYWRQLLNAKLITQRKFDNLTKAERGGLSGYTSDEEVLEVFRNTLNKNSEIFSSIKKLEKLFKNFDEYSSAGIFVKNGPAISTISKDIFGEWNVIRDKWNAEYDDIHLKKKAVVTEKYEDDRRKSFKKIGSFSLEQLQEYADADLSVVEKLKEIIIQKVDEIYKVYGSSEKLFDADFVLEKSLKKNDAVVAIMKDLLDSVKSFENYIKAFFGEGKETNRDESFYGDFVLAYDILLKVDHIYDAIRNYVTQKPYSKDKFKLYFQNPQFMGGWDKDKETDYRATILRYGSKYYLAIMDKKYAKCLQKIDKDDVNGNYEKINYKLLPGPNKMLPKVFFSKKWMAYYNPSEDIQKIYKNGTFKKGDMFNLNDCHKLIDFFKDSISRYPKWSNAYDFNFSETEKYKDIAGFYREVEEQGYKVSFESASKKEVDKLVEEGKLYMFQIYNKDFSDKSHGTPNLHTMYFKLLFDENNHGQIRLSGGAELFMRRASLKKEELVVHPANSPIANKNPDNPKKTTTLSYDVYKDKRFSEDQYELHIPIAINKCPKNIFKINTEVRVLLKHDDNPYVIGIDRGERNLLYIVVVDGKGNIVEQYSLNEIINNFNGIRIKTDYHSLLDKKEKERFEARQNWTSIENIKELKAGYISQVVHKICELVEKYDAVIALEDLNSGFKNSRVKVEKQVYQKFEKMLIDKLNYMVDKKSNPCATGGALKGYQITNKFESFKSMSTQNGFIFYIPAWLTSKIDPSTGFVNLLKTKYTSIADSKKFISSFDRIMYVPEEDLFEFALDYKNFSRTDADYIKKWKLYSYGNRIRIFRNPKKNNVFDWEEVCLTSAYKELFNKYGINYQQGDIRALLCEQSDKAFYSSFMALMSLMLQMRNSITGRTDVDFLISPVKNSDGIFYDSRNYEAQENAILPKNADANGAYNIARKVLWAIGQFKKAEDEKLDKVKIAISNKEWLEYAQTSVKH

SEQ ID NO: 356 - protein, 1375 aa, Synthetic construct
SKLEKFTNCYSLRKTLRFKAIPVGKTQENIDNKRLLVEDEKRAEDYKGVKKLLDRYYLSFINDVLHSIKLKNLNNYISLFRKKTRTEKENKELENLEINLRKEIAKAFKGNEGYKSLFKKDIIETILPEFLDDKDEIALVNSFNGFTTAFTGFFDNRENMFSEEAKSTSIAFRCINENLTRYISNMDIFEKVDAIFDKHEVQEIKEKILNSDYDVEDFFEGEFFNFVLTQEGIDVYNAIIGGFVTESGEKIKGLNEYINLYNQKTKQKLPKFKPLYKQVLSDRESLSFYGEGSSGENQTTQKGQKNSRERMKRIEEGIKELGSQILKEHPVENTQLQNEKLYLYYLQNGRDMYVDQELDINRLSDYDVDHIVPQSFLKDDSIDNKVLTRSDKNRGKSDNVPSEEVVKKMKNYWRQLLNAKLITQRKFDNLTKAERGGLSGYTSDEEVLEVFRNTLNKNSEIFSSIKKLEKLFKNFDEYSSAGIFVKNGPAISTISKDIFGEWNVIRDKWNAEYDDIHLKKKAVVTEKYEDDRRKSFKKIGSFSLEQLQEYADADLSVVEKLKEIIIQKVDEIYKVYGSSEKLFDADFVLEKSLKKNDAVVAIMKDLLDSVKSFENYIKAFFGEGKETNRDESFYGDFVLAYDILLKVDHIYDAIRNYVTQKPYSKDKFKLYFQNPQFMGGWDKDKETDYRATILRYGSKYYLAIMDKKYAKCLQKIDKDDVNGNYEKINYKLLPGPNKMLPKVFFSKKWMAYYNPSEDIQKIYKNGTFKKGDMFNLNDCHKLIDFFKDSISRYPKWSNAYDFNFSETEKYKDIAGFYREVEEQGYKVSFESASKKEVDKLVEEGKLYMFQIYNKDFSDKSHGTPNLHTMYFKLLFDENNHGQIRLSGGAELFMRRASLKKEELVVHPANSPIANKNPDNPKKTTTLSYDVYKDKRFSEDQYELHIPIAINKCPKNIFKINTEVRVLLKHDDNPYVIGIDRGERNLLYIVVVDGKGNIVEQYSLNEIINNFNGIRIKTDYHSLLDKKEKERFEARQNWTSIENIKELKAGYISQVVHKICELVEKYDAVIALEDLNSGFKNSRVKVEKQVYQKFEKMLIDKLNYMVDKKSNPCATGGALKGYQITNKFESFKSMSTQNGFIFYIPAWLTSKIDPSTGFVNLLKTKYTSIADSKKFISSFDRIMYVPEEDLFEFALDYKNFSRTDADYIKKWKLYSYGNRIRIFRNPKKNNVFDWEEVCLTSAYKELFNKYGINYQQGDIRALLCEQSDKAFYSSFMALMSLMLQMRNSITGRTDVDFLISPVKNSDGIFYDSRNYEAQENAILPKNADANGAYNIARKVLWAIGQFKKAEDEKLDKVKIAISNKEWLEYAQTSVKH

SEQ ID NO: 357 - protein, 1375 aa, Synthetic construct
SKLEKFTNCYSLSKTLRFKAIPVGKTQENIDNKRLLVEDEKRAEDYKGVKKLLDRYYLSFINDVLHSIKLKNLNNYISLFRKKTRTEKENKELENLEINLRKEIAKAFKGNEGYKSLFKKDIIETILPEFLDDKDEIALVNSFNGFTTAFRGFFDNRENMFSEEAKSTSIAFRCINENLTRYISNMDIFEKVDAIFDKHEVQEIKEKILNSDYDVEDFFEGEFFNFVLTQEGIDVYNAIIGGFVTESGEKIKGLNEYINLYNQKTKQKLPKFKPLYKQVLSDRESLSFYGEGSSGENQTTQKGQKNSRERMKRIEEGIKELGSQILKEHPVENTQLQNEKLYLYYLQNGRDMYVDQELDINRLSDYDVDHIVPQSFLKDDSIDNKVLTRSDKNRGKSDNVPSEEVVKKMKNYWRQLLNAKLITQRKFDNLTKAERGGLSGYTSDEEVLEVFRNTLNKNSEIFSSIKKLEKLFKNFDEYSSAGIFVKNGPAISTISKDIFGEWNVIRDKWNAEYDDIHLKKKAVVTEKYEDDRRKSFKKIGSFSLEQLQEYADADLSVVEKLKEIIIQKVDEIYKVYGSSEKLFDADFVLEKSLKKNDAVVAIMKDLLDSVKSFENYIKAFFGEGKETNRDESFYGDFVLAYDILLKVDHIYDAIRNYVTQKPYSKDKFKLYFQNPQFMGGWDKDKETDYRATILRYGSKYYLAIMDKKYAKCLQKIDKDDVNGNYEKINYKLLPGPNKMLPKVFFSKKWMAYYNPSEDIQKIYKNGTFKKGDMFNLNDCHKLIDFFKDSISRYPKWSNAYDFNFSETEKYKDIAGFYREVEEQGYKVSFESASKKEVDKLVEEGKLYMFQIYNKDFSDKSHGTPNLHTMYFKLLFDENNHGQIRLSGGAELFMRRASLKKEELVVHPANSPIANKNPDNPKKTTTLSYDVYKDKRFSEDQYELHIPIAINKCPKNIFKINTEVRVLLKHDDNPYVIGIDRGERNLLYIVVVDGKGNIVEQYSLNEIINNFNGIRIKTDYHSLLDKKEKERFEARQNWTSIENIKELKAGYISQVVHKICELVEKYDAVIALEDLNSGFKNSRVKVEKQVYQKFEKMLIDKLNYMVDKKSNPCATGGALKGYQITNKFESFKSMSTQNGFIFYIPAWLTSKIDPSTGFVNLLKTKYTSIADSKKFISSFDRIMYVPEEDLFEFALDYKNFSRTDADYIKKWKLYSYGNRIRIFRNPKKNNVFDWEEVCLTSAYKELFNKYGINYQQGDIRALLCEQSDKAFYSSFMALMSLMLQMRNSITGRTDVDFLISPVKNSDGIFYDSRNYEAQENAILPKNADANGAYNIARKVLWAIGQFKKAEDEKLDKVKIAISNKEWLEYAQTSVKH

SEQ ID NO: 358 - protein, 1375 aa, Synthetic construct
SKLEKFTNCYSLSKTLRFKAIPVGKTQENIDNKRLLVEDEKRAEDYKGVKKLLDRYYLSFINDVLHSIKLKNLNNYISLFRKKTRTEKENKELENLEINLRKEIAKAFKGNEGYKSLFKKDIIETILPEFLDDKDEIALVNSFNGFTTAFTGFFRNRENMFSEEAKSTSIAFRCINENLTRYISNMDIFEKVDAIFDKHEVQEIKEKILNSDYDVEDFFEGEFFNFVLTQEGIDVYNAIIGGFVTESGEKIKGLNEYINLYNQKTKQKLPKFKPLYKQVLSDRESLSFYGEGSSGENQTTQKGQKNSRERMKRIEEGIKELGSQILKEHPVENTQLQNEKLYLYYLQNGRDMYVDQELDINRLSDYDVDHIVPQSFLKDDSIDNKVLTRSDKNRGKSDNVPSEEVVKKMKNYWRQLLNAKLITQRKFDNLTKAERGGLSGYTSDEEVLEVFRNTLNKNSEIFSSIKKLEKLFKNFDEYSSAGIFVKNGPAISTISKDIFGEWNVIRDKWNAEYDDIHLKKKAVVTEKYEDDRRKSFKKIGSFSLEQLQEYADADLSVVEKLKEIIIQKVDEIYKVYGSSEKLFDADFVLEKSLKKNDAVVAIMKDLLDSVKSFENYIKAFFGEGKETNRDESFYGDFVLAYDILLKVDHIYDAIRNYVTQKPYSKDKFKLYFQNPQFMGGWDKDKETDYRATILRYGSKYYLAIMDKKYAKCLQKIDKDDVNGNYEKINYKLLPGPNKMLPKVFFSKKWMAYYNPSEDIQKIYKNGTFKKGDMFNLNDCHKLIDFFKDSISRYPKWSNAYDFNFSETEKYKDIAGFYREVEEQGYKVSFESASKKEVDKLVEEGKLYMFQIYNKDFSDKSHGTPNLHTMYFKLLFDENNHGQIRLSGGAELFMRRASLKKEELVVHPANSPIANKNPDNPKKTTTLSYDVYKDKRFSEDQYELHIPIAINKCPKNIFKINTEVRVLLKHDDNPYVIGIDRGERNLLYIVVVDGKGNIVEQYSLNEIINNFNGIRIKTDYHSLLDKKEKERFEARQNWTSIENIKELKAGYISQVVHKICELVEKYDAVIALEDLNSGFKNSRVKVEKQVYQKFEKMLIDKLNYMVDKKSNPCATGGALKGYQITNKFESFKSMSTQNGFIFYIPAWLTSKIDPSTGFVNLLKTKYTSIADSKKFISSFDRIMYVPEEDLFEFALDYKNFSRTDADYIKKWKLYSYGNRIRIFRNPKKNNVFDWEEVCLTSAYKELFNKYGINYQQGDIRALLCEQSDKAFYSSFMALMSLMLQMRNSITGRTDVDFLISPVKNSDGIFYDSRNYEAQENAILPKNADANGAYNIARKVLWAIGQFKKAEDEKLDKVKIAISNKEWLEYAQTSVKH

SEQ ID NO: 359 - protein, 1375 aa, Synthetic construct
SKLEKFTNCYSLSKTLRFKAIPVGKTQENIDNKRLLVEDEKRAEDYKGVKKLLDRYYLSFINDVLHSIKLKNLNNYISLFRKKTRTEKENKELENLEINLRKEIAKAFKGNEGYKSLFKKDIIETILPEFLDDKDEIALVNSFNGFTTAFTGFFDRRENMFSEEAKSTSIAFRCINENLTRYISNMDIFEKVDAIFDKHEVQEIKEKILNSDYDVEDFFEGEFFNFVLTQEGIDVYNAIIGGFVTESGEKIKGLNEYINLYNQKTKQKLPKFKPLYKQVLSDRESLSFYGEGSSGENQTTQKGQKNSRERMKRIEEGIKELGSQILKEHPVENTQLQNEKLYLYYLQNGRDMYVDQELDINRLSDYDVDHIVPQSFLKDDSIDNKVLTRSDKNRGKSDNVPSEEVVKKMKNYWRQLLNAKLITQRKFDNLTKAERGGLSGYTSDEEVLEVFRNTLNKNSEIFSSIKKLEKLFKNFDEYSSAGIFVKNGPAISTISKDIFGEWNVIRDKWNAEYDDIHLKKKAVVTEKYEDDRRKSFKKIGSFSLEQLQEYADADLSVVEKLKEIIIQKVDEIYKVYGSSEKLFDADFVLEKSLKKNDAVVAIMKDLLDSVKSFENYIKAFFGEGKETNRDESFYGDFVLAYDILLKVDHIYDAIRNYVTQKPYSKDKFKLYFQNPQFMGGWDKDKETDYRATILRYGSKYYLAIMDKKYAKCLQKIDKDDVNGNYEKINYKLLPGPNKMLPKVFFSKKWMAYYNPSEDIQKIYKNGTFKKGDMFNLNDCHKLIDFFKDSISRYPKWSNAYDFNFSETEKYKDIAGFYREVEEQGYKVSFESASKKEVDKLVEEGKLYMFQIYNKDFSDKSHGTPNLHTMYFKLLFDENNHGQIRLSGGAELFMRRASLKKEELVVHPANSPIANKNPDNPKKTTTLSYDVYKDKRFSEDQYELHIPIAINKCPKNIFKINTEVRVLLKHDDNPYVIGIDRGERNLLYIVVVDGKGNIVEQYSLNEIINNFNGIRIKTDYHSLLDKKEKERFEARQNWTSIENIKELKAGYISQVVHKICELVEKYDAVIALEDLNSGFKNSRVKVEKQVYQKFEKMLIDKLNYMVDKKSNPCATGGALKGYQITNKFESFKSMSTQNGFIFYIPAWLTSKIDPSTGFVNLLKTKYTSIADSKKFISSFDRIMYVPEEDLFEFALDYKNFSRTDADYIKKWKLYSYGNRIRIFRNPKKNNVFDWEEVCLTSAYKELFNKYGINYQQGDIRALLCEQSDKAFYSSFMALMSLMLQMRNSITGRTDVDFLISPVKNSDGIFYDSRNYEAQENAILPKNADANGAYNIARKVLWAIGQFKKAEDEKLDKVKIAISNKEWLEYAQTSVKH

SEQ ID NO: 360 - protein, 1375 aa, Synthetic construct
SKLEKFTNCYSLSKTLRFKAIPVGKTQENIDNKRLLVEDEKRAEDYKGVKKLLDRYYLSFINDVLHSIKLKNLNNYISLFRKKTRTEKENKELENLEINLRKEIAKAFKGNEGYKSLFKKDIIETILPEFLDDKDEIALVNSFNGFTTAFTGFFDNRRNMFSEEAKSTSIAFRCINENLTRYISNMDIFEKVDAIFDKHEVQEIKEKILNSDYDVEDFFEGEFFNFVLTQEGIDVYNAIIGGFVTESGEKIKGLNEYINLYNQKTKQKLPKFKPLYKQVLSDRESLSFYGEGSSGENQTTQKGQKNSRERMKRIEEGIKELGSQILKEHPVENTQLQNEKLYLYYLQNGRDMYVDQELDINRLSDYDVDHIVPQSFLKDDSIDNKVLTRSDKNRGKSDNVPSEEVVKKMKNYWRQLLNAKLITQRKFDNLTKAERGGLSGYTSDEEVLEVFRNTLNKNSEIFSSIKKLEKLFKNFDEYSSAGIFVKNGPAISTISKDIFGEWNVIRDKWNAEYDDIHLKKKAVVTEKYEDDRRKSFKKIGSFSLEQLQEYADADLSVVEKLKEIIIQKVDEIYKVYGSSEKLFDADFVLEKSLKKNDAVVAIMKDLLDSVKSFENYIKAFFGEGKETNRDESFYGDFVLAYDILLKVDHIYDAIRNYVTQKPYSKDKFKLYFQNPQFMGGWDKDKETDYRATILRYGSKYYLAIMDKKYAKCLQKIDKDDVNGNYEKINYKLLPGPNKMLPKVFFSKKWMAYYNPSEDIQKIYKNGTFKKGDMFNLNDCHKLIDFFKDSISRYPKWSNAYDFNFSETEKYKDIAGFYREVEEQGYKVSFESASKKEVDKLVEEGKLYMFQIYNKDFSDKSHGTPNLHTMYFKLLFDENNHGQIRLSGGAELFMRRASLKKEELVVHPANSPIANKNPDNPKKTTTLSYDVYKDKRFSEDQYELHIPIAINKCPKNIFKINTEVRVLLKHDDNPYVIGIDRGERNLLYIVVVDGKGNIVEQYSLNEIINNFNGIRIKTDYHSLLDKKEKERFEARQNWTSIENIKELKAGYISQVVHKICELVEKYDAVIALEDLNSGFKNSRVKVEKQVYQKFEKMLIDKLNYMVDKKSNPCATGGALKGYQITNKFESFKSMSTQNGFIFYIPAWLTSKIDPSTGFVNLLKTKYTSIADSKKFISSFDRIMYVPEEDLFEFALDYKNFSRTDADYIKKWKLYSYGNRIRIFRNPKKNNVFDWEEVCLTSAYKELFNKYGINYQQGDIRALLCEQSDKAFYSSFMALMSLMLQMRNSITGRTDVDFLISPVKNSDGIFYDSRNYEAQENAILPKNADANGAYNIARKVLWAIGQFKKAEDEKLDKVKIAISNKEWLEYAQTSVKH

SEQ ID NO: 361 - protein, 1375 aa, Synthetic construct
SKLEKFTNCYSLSKTLRFKAIPVGKTQENIDNKRLLVEDEKRAEDYKGVKKLLDRYYLSFINDVLHSIKLKNLNNYISLFRKKTRTEKENKELENLEINLRKEIAKAFKGNEGYKSLFKKDIIETILPEFLDDKDEIALVNSFNGFTTAFTGFFDNRERMFSEEAKSTSIAFRCINENLTRYISNMDIFEKVDAIFDKHEVQEIKEKILNSDYDVEDFFEGEFFNFVLTQEGIDVYNAIIGGFVTESGEKIKGLNEYINLYNQKTKQKLPKFKPLYKQVLSDRESLSFYGEGSSGENQTTQKGQKNSRERMKRIEEGIKELGSQILKEHPVENTQLQNEKLYLYYLQNGRDMYVDQELDINRLSDYDVDHIVPQSFLKDDSIDNKVLTRSDKNRGKSDNVPSEEVVKKMKNYWRQLLNAKLITQRKFDNLTKAERGGLSGYTSDEEVLEVFRNTLNKNSEIFSSIKKLEKLFKNFDEYSSAGIFVKNGPAISTISKDIFGEWNVIRDKWNAEYDDIHLKKKAVVTEKYEDDRRKSFKKIGSFSLEQLQEYADADLSVVEKLKEIIIQKVDEIYKVYGSSEKLFDADFVLEKSLKKNDAVVAIMKDLLDSVKSFENYIKAFFGEGKETNRDESFYGDFVLAYDILLKVDHIYDAIRNYVTQKPYSKDKFKLYFQNPQFMGGWDKDKETDYRATILRYGSKYYLAIMDKKYAKCLQKIDKDDVNGNYEKINYKLLPGPNKMLPKVFFSKKWMAYYNPSEDIQKIYKNGTFKKGDMFNLNDCHKLIDFFKDSISRYPKWSNAYDFNFSETEKYKDIAGFYREVEEQGYKVSFESASKKEVDKLVEEGKLYMFQIYNKDFSDKSHGTPNLHTMYFKLLFDENNHGQIRLSGGAELFMRRASLKKEELVVHPANSPIANKNPDNPKKTTTLSYDVYKDKRFSEDQYELHIPIAINKCPKNIFKINTEVRVLLKHDDNPYVIGIDRGERNLLYIVVVDGKGNIVEQYSLNEIINNFNGIRIKTDYHSLLDKKEKERFEARQNWTSIENIKELKAGYISQVVHKICELVEKYDAVIALEDLNSGFKNSRVKVEKQVYQKFEKMLIDKLNYMVDKKSNPCATGGALKGYQITNKFESFKSMSTQNGFIFYIPAWLTSKIDPSTGFVNLLKTKYTSIADSKKFISSFDRIMYVPEEDLFEFALDYKNFSRTDADYIKKWKLYSYGNRIRIFRNPKKNNVFDWEEVCLTSAYKELFNKYGINYQQGDIRALLCEQSDKAFYSSFMALMSLMLQMRNSITGRTDVDFLISPVKNSDGIFYDSRNYEAQENAILPKNADANGAYNIARKVLWAIGQFKKAEDEKLDKVKIAISNKEWLEYAQTSVKH

SEQ ID NO: 362 - protein, 1375 aa, Synthetic construct
SKLEKFTNCYSLSKTLRFKAIPVGKTQENIDNKRLLVEDEKRAEDYKGVKKLLDRYYLSFINDVLHSIKLKNLNNYISLFRKKTRTEKENKELENLEINLRKEIAKAFKGNEGYKSLFKKDIIETILPEFLDDKDEIALVNSFNGFTTAFTGFFDNRENMFSERAKSTSIAFRCINENLTRYISNMDIFEKVDAIFDKHEVQEIKEKILNSDYDVEDFFEGEFFNFVLTQEGIDVYNAIIGGFVTESGEKIKGLNEYINLYNQKTKQKLPKFKPLYKQVLSDRESLSFYGEGSSGENQTTQKGQKNSRERMKRIEEGIKELGSQILKEHPVENTQLQNEKLYLYYLQNGRDMYVDQELDINRLSDYDVDHIVPQSFLKDDSIDNKVLTRSDKNRGKSDNVPSEEVVKKMKNYWRQLLNAKLITQRKFDNLTKAERGGLSGYTSDEEVLEVFRNTLNKNSEIFSSIKKLEKLFKNFDEYSSAGIFVKNGPAISTISKDIFGEWNVIRDKWNAEYDDIHLKKKAVVTEKYEDDRRKSFKKIGSFSLEQLQEYADADLSVVEKLKEIIIQKVDEIYKVYGSSEKLFDADFVLEKSLKKNDAVVAIMKDLLDSVKSFENYIKAFFGEGKETNRDESFYGDFVLAYDILLKVDHIYDAIRNYVTQKPYSKDKFKLYFQNPQFMGGWDKDKETDYRATILRYGSKYYLAIMDKKYAKCLQKIDKDDVNGNYEKINYKLLPGPNKMLPKVFFSKKWMAYYNPSEDIQKIYKNGTFKKGDMFNLNDCHKLIDFFKDSISRYPKWSNAYDFNFSETEKYKDIAGFYREVEEQGYKVSFESASKKEVDKLVEEGKLYMFQIYNKDFSDKSHGTPNLHTMYFKLLFDENNHGQIRLSGGAELFMRRASLKKEELVVHPANSPIANKNPDNPKKTTTLSYDVYKDKRFSEDQYELHIPIAINKCPKNIFKINTEVRVLLKHDDNPYVIGIDRGERNLLYIVVVDGKGNIVEQYSLNEIINNFNGIRIKTDYHSLLDKKEKERFEARQNWTSIENIKELKAGYISQVVHKICELVEKYDAVIALEDLNSGFKNSRVKVEKQVYQKFEKMLIDKLNYMVDKKSNPCATGGALKGYQITNKFESFKSMSTQNGFIFYIPAWLTSKIDPSTGFVNLLKTKYTSIADSKKFISSFDRIMYVPEEDLFEFALDYKNFSRTDADYIKKWKLYSYGNRIRIFRNPKKNNVFDWEEVCLTSAYKELFNKYGINYQQGDIRALLCEQSDKAFYSSFMALMSLMLQMRNSITGRTDVDFLISPVKNSDGIFYDSRNYEAQENAILPKNADANGAYNIARKVLWAIGQFKKAEDEKLDKVKIAISNKEWLEYAQTSVKH

SEQ ID NO: 363 - protein, 1375 aa, Synthetic construct
SKLEKFTNCYSLSKTLRFKAIPVGKTQENIDNKRLLVEDEKRAEDYKGVKKLLDRYYLSFINDVLHSIKLKNLNNYISLFRKKTRTEKENKELENLEINLRKEIAKAFKGNEGYKSLFKKDIIETILPEFLDDKDEIALVNSFNGFTTAFTGFFDNRENMFSEEARSTSIAFRCINENLTRYISNMDIFEKVDAIFDKHEVQEIKEKILNSDYDVEDFFEGEFFNFVLTQEGIDVYNAIIGGFVTESGEKIKGLNEYINLYNQKTKQKLPKFKPLYKQVLSDRESLSFYGEGSSGENQTTQKGQKNSRERMKRIEEGIKELGSQILKEHPVENTQLQNEKLYLYYLQNGRDMYVDQELDINRLSDYDVDHIVPQSFLKDDSIDNKVLTRSDKNRGKSDNVPSEEVVKKMKNYWRQLLNAKLITQRKFDNLTKAERGGLSGYTSDEEVLEVFRNTLNKNSEIFSSIKKLEKLFKNFDEYSSAGIFVKNGPAISTISKDIFGEWNVIRDKWNAEYDDIHLKKKAVVTEKYEDDRRKSFKKIGSFSLEQLQEYADADLSVVEKLKEIIIQKVDEIYKVYGSSEKLFDADFVLEKSLKKNDAVVAIMKDLLDSVKSFENYIKAFFGEGKETNRDESFYGDFVLAYDILLKVDHIYDAIRNYVTQKPYSKDKFKLYFQNPQFMGGWDKDKETDYRATILRYGSKYYLAIMDKKYAKCLQKIDKDDVNGNYEKINYKLLPGPNKMLPKVFFSKKWMAYYNPSEDIQKIYKNGTFKKGDMFNLNDCHKLIDFFKDSISRYPKWSNAYDFNFSETEKYKDIAGFYREVEEQGYKVSFESASKKEVDKLVEEGKLYMFQIYNKDFSDKSHGTPNLHTMYFKLLFDENNHGQIRLSGGAELFMRRASLKKEELVVHPANSPIANKNPDNPKKTTTLSYDVYKDKRFSEDQYELHIPIAINKCPKNIFKINTEVRVLLKHDDNPYVIGIDRGERNLLYIVVVDGKGNIVEQYSLNEIINNFNGIRIKTDYHSLLDKKEKERFEARQNWTSIENIKELKAGYISQVVHKICELVEKYDAVIALEDLNSGFKNSRVKVEKQVYQKFEKMLIDKLNYMVDKKSNPCATGGALKGYQITNKFESFKSMSTQNGFIFYIPAWLTSKIDPSTGFVNLLKTKYTSIADSKKFISSFDRIMYVPEEDLFEFALDYKNFSRTDADYIKKWKLYSYGNRIRIFRNPKKNNVFDWEEVCLTSAYKELFNKYGINYQQGDIRALLCEQSDKAFYSSFMALMSLMLQMRNSITGRTDVDFLISPVKNSDGIFYDSRNYEAQENAILPKNADANGAYNIARKVLWAIGQFKKAEDEKLDKVKIAISNKEWLEYAQTSVKH

SEQ ID NO: 364 - protein, 1375 aa, Synthetic construct
SKLEKFTNCYSLSKTLRFKAIPVGKTQENIDNKRLLVEDEKRAEDYKGVKKLLDRYYLSFINDVLHSIKLKNLNNYISLFRKKTRTEKENKELENLEINLRKEIAKAFKGNEGYKSLFKKDIIETILPEFLDDKDEIALVNSFNGFTTAFTGFFDNRENMFSEEAKRTSIAFRCINENLTRYISNMDIFEKVDAIFDKHEVQEIKEKILNSDYDVEDFFEGEFFNFVLTQEGIDVYNAIIGGFVTESGEKIKGLNEYINLYNQKTKQKLPKFKPLYKQVLSDRESLSFYGEGSSGENQTTQKGQKNSRERMKRIEEGIKELGSQILKEHPVENTQLQNEKLYLYYLQNGRDMYVDQELDINRLSDYDVDHIVPQSFLKDDSIDNKVLTRSDKNRGKSDNVPSEEVVKKMKNYWRQLLNAKLITQRKFDNLTKAERGGLSGYTSDEEVLEVFRNTLNKNSEIFSSIKKLEKLFKNFDEYSSAGIFVKNGPAISTISKDIFGEWNVIRDKWNAEYDDIHLKKKAVVTEKYEDDRRKSFKKIGSFSLEQLQEYADADLSVVEKLKEIIIQKVDEIYKVYGSSEKLFDADFVLEKSLKKNDAVVAIMKDLLDSVKSFENYIKAFFGEGKETNRDESFYGDFVLAYDILLKVDHIYDAIRNYVTQKPYSKDKFKLYFQNPQFMGGWDKDKETDYRATILRYGSKYYLAIMDKKYAKCLQKIDKDDVNGNYEKINYKLLPGPNKMLPKVFFSKKWMAYYNPSEDIQKIYKNGTFKKGDMFNLNDCHKLIDFFKDSISRYPKWSNAYDFNFSETEKYKDIAGFYREVEEQGYKVSFESASKKEVDKLVEEGKLYMFQIYNKDFSDKSHGTPNLHTMYFKLLFDENNHGQIRLSGGAELFMRRASLKKEELVVHPANSPIANKNPDNPKKTTTLSYDVYKDKRFSEDQYELHIPIAINKCPKNIFKINTEVRVLLKHDDNPYVIGIDRGERNLLYIVVVDGKGNIVEQYSLNEIINNFNGIRIKTDYHSLLDKKEKERFEARQNWTSIENIKELKAGYISQVVHKICELVEKYDAVIALEDLNSGFKNSRVKVEKQVYQKFEKMLIDKLNYMVDKKSNPCATGGALKGYQITNKFESFKSMSTQNGFIFYIPAWLTSKIDPSTGFVNLLKTKYTSIADSKKFISSFDRIMYVPEEDLFEFALDYKNFSRTDADYIKKWKLYSYGNRIRIFRNPKKNNVFDWEEVCLTSAYKELFNKYGINYQQGDIRALLCEQSDKAFYSSFMALMSLMLQMRNSITGRTDVDFLISPVKNSDGIFYDSRNYEAQENAILPKNADANGAYNIARKVLWAIGQFKKAEDEKLDKVKIAISNKEWLEYAQTSVKH

SEQ ID NO: 365 - protein, 1375 aa, Synthetic construct
SKLEKFTNCYSLSKTLRFKAIPVGKTQENIDNKRLLVEDEKRAEDYKGVKKLLDRYYLSFINDVLHSIKLKNLNNYISLFRKKTRTEKENKELENLEINLRKEIAKAFKGNEGYKSLFKKDIIETILPEFLDDKDEIALVNSFNGFTTAFTGFFDNRENMFSEEAKSRSIAFRCINENLTRYISNMDIFEKVDAIFDKHEVQEIKEKILNSDYDVEDFFEGEFFNFVLTQEGIDVYNAIIGGFVTESGEKIKGLNEYINLYNQKTKQKLPKFKPLYKQVLSDRESLSFYGEGSSGENQTTQKGQKNSRERMKRIEEGIKELGSQILKEHPVENTQLQNEKLYLYYLQNGRDMYVDQELDINRLSDYDVDHIVPQSFLKDDSIDNKVLTRSDKNRGKSDNVPSEEVVKKMKNYWRQLLNAKLITQRKFDNLTKAERGGLSGYTSDEEVLEVFRNTLNKNSEIFSSIKKLEKLFKNFDEYSSAGIFVKNGPAISTISKDIFGEWNVIRDKWNAEYDDIHLKKKAVVTEKYEDDRRKSFKKIGSFSLEQLQEYADADLSVVEKLKEIIIQKVDEIYKVYGSSEKLFDADFVLEKSLKKNDAVVAIMKDLLDSVKSFENYIKAFFGEGKETNRDESFYGDFVLAYDILLKVDHIYDAIRNYVTQKPYSKDKFKLYFQNPQFMGGWDKDKETDYRATILRYGSKYYLAIMDKKYAKCLQKIDKDDVNGNYEKINYKLLPGPNKMLPKVFFSKKWMAYYNPSEDIQKIYKNGTFKKGDMFNLNDCHKLIDFFKDSISRYPKWSNAYDFNFSETEKYKDIAGFYREVEEQGYKVSFESASKKEVDKLVEEGKLYMFQIYNKDFSDKSHGTPNLHTMYFKLLFDENNHGQIRLSGGAELFMRRASLKKEELVVHPANSPIANKNPDNPKKTTTLSYDVYKDKRFSEDQYELHIPIAINKCPKNIFKINTEVRVLLKHDDNPYVIGIDRGERNLLYIVVVDGKGNIVEQYSLNEIINNFNGIRIKTDYHSLLDKKEKERFEARQNWTSIENIKELKAGYISQVVHKICELVEKYDAVIALEDLNSGFKNSRVKVEKQVYQKFEKMLIDKLNYMVDKKSNPCATGGALKGYQITNKFESFKSMSTQNGFIFYIPAWLTSKIDPSTGFVNLLKTKYTSIADSKKFISSFDRIMYVPEEDLFEFALDYKNFSRTDADYIKKWKLYSYGNRIRIFRNPKKNNVFDWEEVCLTSAYKELFNKYGINYQQGDIRALLCEQSDKAFYSSFMALMSLMLQMRNSITGRTDVDFLISPVKNSDGIFYDSRNYEAQENAILPKNADANGAYNIARKVLWAIGQFKKAEDEKLDKVKIAISNKEWLEYAQTSVKH

SEQ ID NO: 366 - protein, 1375 aa, Synthetic construct
SKLEKFTNCYSLSKTLRFKAIPVGKTQENIDNKRLLVEDEKRAEDYKGVKKLLDRYYLSFINDVLHSIKLKNLNNYISLFRKKTRTEKENKELENLEINLRKEIAKAFKGNEGYKSLFKKDIIETILPEFLDDKDEIALVNSFNGFTTAFTGFFDNRENMFSEEAKSTSIAFRCINENLTRYISNMDIFEKVDAIFDKHEVQEIKEKILNSDYDVEDFFEGEFFNFVLTQEGIDVYNAIIGGFVTESGERIKGLNEYINLYNQKTKQKLPKFKPLYKQVLSDRESLSFYGEGSSGENQTTQKGQKNSRERMKRIEEGIKELGSQILKEHPVENTQLQNEKLYLYYLQNGRDMYVDQELDINRLSDYDVDHIVPQSFLKDDSIDNKVLTRSDKNRGKSDNVPSEEVVKKMKNYWRQLLNAKLITQRKFDNLTKAERGGLSGYTSDEEVLEVFRNTLNKNSEIFSSIKKLEKLFKNFDEYSSAGIFVKNGPAISTISKDIFGEWNVIRDKWNAEYDDIHLKKKAVVTEKYEDDRRKSFKKIGSFSLEQLQEYADADLSVVEKLKEIIIQKVDEIYKVYGSSEKLFDADFVLEKSLKKNDAVVAIMKDLLDSVKSFENYIKAFFGEGKETNRDESFYGDFVLAYDILLKVDHIYDAIRNYVTQKPYSKDKFKLYFQNPQFMGGWDKDKETDYRATILRYGSKYYLAIMDKKYAKCLQKIDKDDVNGNYEKINYKLLPGPNKMLPKVFFSKKWMAYYNPSEDIQKIYKNGTFKKGDMFNLNDCHKLIDFFKDSISRYPKWSNAYDFNFSETEKYKDIAGFYREVEEQGYKVSFESASKKEVDKLVEEGKLYMFQIYNKDFSDKSHGTPNLHTMYFKLLFDENNHGQIRLSGGAELFMRRASLKKEELVVHPANSPIANKNPDNPKKTTTLSYDVYKDKRFSEDQYELHIPIAINKCPKNIFKINTEVRVLLKHDDNPYVIGIDRGERNLLYIVVVDGKGNIVEQYSLNEIINNFNGIRIKTDYHSLLDKKEKERFEARQNWTSIENIKELKAGYISQVVHKICELVEKYDAVIALEDLNSGFKNSRVKVEKQVYQKFEKMLIDKLNYMVDKKSNPCATGGALKGYQITNKFESFKSMSTQNGFIFYIPAWLTSKIDPSTGFVNLLKTKYTSIADSKKFISSFDRIMYVPEEDLFEFALDYKNFSRTDADYIKKWKLYSYGNRIRIFRNPKKNNVFDWEEVCLTSAYKELFNKYGINYQQGDIRALLCEQSDKAFYSSFMALMSLMLQMRNSITGRTDVDFLISPVKNSDGIFYDSRNYEAQENAILPKNADANGAYNIARKVLWAIGQFKKAEDEKLDKVKIAISNKEWLEYAQTSVKH

SEQ ID NO: 367 - protein, 1375 aa, Synthetic construct
SKLEKFTNCYSLSKTLRFKAIPVGKTQENIDNKRLLVEDEKRAEDYKGVKKLLDRYYLSFINDVLHSIKLKNLNNYISLFRKKTRTEKENKELENLEINLRKEIAKAFKGNEGYKSLFKKDIIETILPEFLDDKDEIALVNSFNGFTTAFTGFFDNRENMFSEEAKSTSIAFRCINENLTRYISNMDIFEKVDAIFDKHEVQEIKEKILNSDYDVEDFFEGEFFNFVLTQEGIDVYNAIIGGFVTESGEKIKGLNRYINLYNQKTKQKLPKFKPLYKQVLSDRESLSFYGEGSSGENQTTQKGQKNSRERMKRIEEGIKELGSQILKEHPVENTQLQNEKLYLYYLQNGRDMYVDQELDINRLSDYDVDHIVPQSFLKDDSIDNKVLTRSDKNRGKSDNVPSEEVVKKMKNYWRQLLNAKLITQRKFDNLTKAERGGLSGYTSDEEVLEVFRNTLNKNSEIFSSIKKLEKLFKNFDEYSSAGIFVKNGPAISTISKDIFGEWNVIRDKWNAEYDDIHLKKKAVVTEKYEDDRRKSFKKIGSFSLEQLQEYADADLSVVEKLKEIIIQKVDEIYKVYGSSEKLFDADFVLEKSLKKNDAVVAIMKDLLDSVKSFENYIKAFFGEGKETNRDESFYGDFVLAYDILLKVDHIYDAIRNYVTQKPYSKDKFKLYFQNPQFMGGWDKDKETDYRATILRYGSKYYLAIMDKKYAKCLQKIDKDDVNGNYEKINYKLLPGPNKMLPKVFFSKKWMAYYNPSEDIQKIYKNGTFKKGDMFNLNDCHKLIDFFKDSISRYPKWSNAYDFNFSETEKYKDIAGFYREVEEQGYKVSFESASKKEVDKLVEEGKLYMFQIYNKDFSDKSHGTPNLHTMYFKLLFDENNHGQIRLSGGAELFMRRASLKKEELVVHPANSPIANKNPDNPKKTTTLSYDVYKDKRFSEDQYELHIPIAINKCPKNIFKINTEVRVLLKHDDNPYVIGIDRGERNLLYIVVVDGKGNIVEQYSLNEIINNFNGIRIKTDYHSLLDKKEKERFEARQNWTSIENIKELKAGYISQVVHKICELVEKYDAVIALEDLNSGFKNSRVKVEKQVYQKFEKMLIDKLNYMVDKKSNPCATGGALKGYQITNKFESFKSMSTQNGFIFYIPAWLTSKIDPSTGFVNLLKTKYTSIADSKKFISSFDRIMYVPEEDLFEFALDYKNFSRTDADYIKKWKLYSYGNRIRIFRNPKKNNVFDWEEVCLTSAYKELFNKYGINYQQGDIRALLCEQSDKAFYSSFMALMSLMLQMRNSITGRTDVDFLISPVKNSDGIFYDSRNYEAQENAILPKNADANGAYNIARKVLWAIGQFKKAEDEKLDKVKIAISNKEWLEYAQTSVKH

SEQ ID NO: 368 - protein, 1375 aa, Synthetic construct
SKLEKFTNCYSLSKTLRFKAIPVGKTQENIDNKRLLVEDEKRAEDYKGVKKLLDRYYLSFINDVLHSIKLKNLNNYISLFRKKTRTEKENKELENLEINLRKEIAKAFKGNEGYKSLFKKDIIETILPEFLDDKDEIALVNSFNGFTTAFTGFFDNRENMFSEEAKSTSIAFRCINENLTRYISNMDIFEKVDAIFDKHEVQEIKEKILNSDYDVEDFFEGEFFNFVLTQEGIDVYNAIIGGFVTESGEKIKGLNEYIRLYNQKTKQKLPKFKPLYKQVLSDRESLSFYGEGSSGENQTTQKGQKNSRERMKRIEEGIKELGSQILKEHPVENTQLQNEKLYLYYLQNGRDMYVDQELDINRLSDYDVDHIVPQSFLKDDSIDNKVLTRSDKNRGKSDNVPSEEVVKKMKNYWRQLLNAKLITQRKFDNLTKAERGGLSGYTSDEEVLEVFRNTLNKNSEIFSSIKKLEKLFKNFDEYSSAGIFVKNGPAISTISKDIFGEWNVIRDKWNAEYDDIHLKKKAVVTEKYEDDRRKSFKKIGSFSLEQLQEYADADLSVVEKLKEIIIQKVDEIYKVYGSSEKLFDADFVLEKSLKKNDAVVAIMKDLLDSVKSFENYIKAFFGEGKETNRDESFYGDFVLAYDILLKVDHIYDAIRNYVTQKPYSKDKFKLYFQNPQFMGGWDKDKETDYRATILRYGSKYYLAIMDKKYAKCLQKIDKDDVNGNYEKINYKLLPGPNKMLPKVFFSKKWMAYYNPSEDIQKIYKNGTFKKGDMFNLNDCHKLIDFFKDSISRYPKWSNAYDFNFSETEKYKDIAGFYREVEEQGYKVSFESASKKEVDKLVEEGKLYMFQIYNKDFSDKSHGTPNLHTMYFKLLFDENNHGQIRLSGGAELFMRRASLKKEELVVHPANSPIANKNPDNPKKTTTLSYDVYKDKRFSEDQYELHIPIAINKCPKNIFKINTEVRVLLKHDDNPYVIGIDRGERNLLYIVVVDGKGNIVEQYSLNEIINNFNGIRIKTDYHSLLDKKEKERFEARQNWTSIENIKELKAGYISQVVHKICELVEKYDAVIALEDLNSGFKNSRVKVEKQVYQKFEKMLIDKLNYMVDKKSNPCATGGALKGYQITNKFESFKSMSTQNGFIFYIPAWLTSKIDPSTGFVNLLKTKYTSIADSKKFISSFDRIMYVPEEDLFEFALDYKNFSRTDADYIKKWKLYSYGNRIRIFRNPKKNNVFDWEEVCLTSAYKELFNKYGINYQQGDIRALLCEQSDKAFYSSFMALMSLMLQMRNSITGRTDVDFLISPVKNSDGIFYDSRNYEAQENAILPKNADANGAYNIARKVLWAIGQFKKAEDEKLDKVKIAISNKEWLEYAQTSVKH

SEQ ID NO: 369 - protein, 1375 aa, Synthetic construct
SKLEKFTNCYSLSKTLRFKAIPVGKTQENIDNKRLLVEDEKRAEDYKGVKKLLDRYYLSFINDVLHSIKLKNLNNYISLFRKKTRTEKENKELENLEINLRKEIAKAFKGNEGYKSLFKKDIIETILPEFLDDKDEIALVNSFNGFTTAFTGFFDNRENMFSEEAKSTSIAFRCINENLTRYISNMDIFEKVDAIFDKHEVQEIKEKILNSDYDVEDFFEGEFFNFVLTQEGIDVYNAIIGGFVTESGEKIKGLNEYINLYNRKTKQKLPKFKPLYKQVLSDRESLSFYGEGSSGENQTTQKGQKNSRERMKRIEEGIKELGSQILKEHPVENTQLQNEKLYLYYLQNGRDMYVDQELDINRLSDYDVDHIVPQSFLKDDSIDNKVLTRSDKNRGKSDNVPSEEVVKKMKNYWRQLLNAKLITQRKFDNLTKAERGGLSGYTSDEEVLEVFRNTLNKNSEIFSSIKKLEKLFKNFDEYSSAGIFVKNGPAISTISKDIFGEWNVIRDKWNAEYDDIHLKKKAVVTEKYEDDRRKSFKKIGSFSLEQLQEYADADLSVVEKLKEIIIQKVDEIYKVYGSSEKLFDADFVLEKSLKKNDAVVAIMKDLLDSVKSFENYIKAFFGEGKETNRDESFYGDFVLAYDILLKVDHIYDAIRNYVTQKPYSKDKFKLYFQNPQFMGGWDKDKETDYRATILRYGSKYYLAIMDKKYAKCLQKIDKDDVNGNYEKINYKLLPGPNKMLPKVFFSKKWMAYYNPSEDIQKIYKNGTFKKGDMFNLNDCHKLIDFFKDSISRYPKWSNAYDFNFSETEKYKDIAGFYREVEEQGYKVSFESASKKEVDKLVEEGKLYMFQIYNKDFSDKSHGTPNLHTMYFKLLFDENNHGQIRLSGGAELFMRRASLKKEELVVHPANSPIANKNPDNPKKTTTLSYDVYKDKRFSEDQYELHIPIAINKCPKNIFKINTEVRVLLKHDDNPYVIGIDRGERNLLYIVVVDGKGNIVEQYSLNEIINNFNGIRIKTDYHSLLDKKEKERFEARQNWTSIENIKELKAGYISQVVHKICELVEKYDAVIALEDLNSGFKNSRVKVEKQVYQKFEKMLIDKLNYMVDKKSNPCATGGALKGYQITNKFESFKSMSTQNGFIFYIPAWLTSKIDPSTGFVNLLKTKYTSIADSKKFISSFDRIMYVPEEDLFEFALDYKNFSRTDADYIKKWKLYSYGNRIRIFRNPKKNNVFDWEEVCLTSAYKELFNKYGINYQQGDIRALLCEQSDKAFYSSFMALMSLMLQMRNSITGRTDVDFLISPVKNSDGIFYDSRNYEAQENAILPKNADANGAYNIARKVLWAIGQFKKAEDEKLDKVKIAISNKEWLEYAQTSVKH

SEQ ID NO: 370 - protein, 1375 aa, Synthetic construct
SKLEKFTNCYSLSKTLRFKAIPVGKTQENIDNKRLLVEDEKRAEDYKGVKKLLDRYYLSFINDVLHSIKLKNLNNYISLFRKKTRTEKENKELENLEINLRKEIAKAFKGNEGYKSLFKKDIIETILPEFLDDKDEIALVNSFNGFTTAFTGFFDNRENMFSEEAKSTSIAFRCINENLTRYISNMDIFEKVDAIFDKHEVQEIKEKILNSDYDVEDFFEGEFFNFVLTQEGIDVYNAIIGGFVTESGEKIKGLNEYINLYNQKTKQKLPRFKPLYKQVLSDRESLSFYGEGSSGENQTTQKGQKNSRERMKRIEEGIKELGSQILKEHPVENTQLQNEKLYLYYLQNGRDMYVDQELDINRLSDYDVDHIVPQSFLKDDSIDNKVLTRSDKNRGKSDNVPSEEVVKKMKNYWRQLLNAKLITQRKFDNLTKAERGGLSGYTSDEEVLEVFRNTLNKNSEIFSSIKKLEKLFKNFDEYSSAGIFVKNGPAISTISKDIFGEWNVIRDKWNAEYDDIHLKKKAVVTEKYEDDRRKSFKKIGSFSLEQLQEYADADLSVVEKLKEIIIQKVDEIYKVYGSSEKLFDADFVLEKSLKKNDAVVAIMKDLLDSVKSFENYIKAFFGEGKETNRDESFYGDFVLAYDILLKVDHIYDAIRNYVTQKPYSKDKFKLYFQNPQFMGGWDKDKETDYRATILRYGSKYYLAIMDKKYAKCLQKIDKDDVNGNYEKINYKLLPGPNKMLPKVFFSKKWMAYYNPSEDIQKIYKNGTFKKGDMFNLNDCHKLIDFFKDSISRYPKWSNAYDFNFSETEKYKDIAGFYREVEEQGYKVSFESASKKEVDKLVEEGKLYMFQIYNKDFSDKSHGTPNLHTMYFKLLFDENNHGQIRLSGGAELFMRRASLKKEELVVHPANSPIANKNPDNPKKTTTLSYDVYKDKRFSEDQYELHIPIAINKCPKNIFKINTEVRVLLKHDDNPYVIGIDRGERNLLYIVVVDGKGNIVEQYSLNEIINNFNGIRIKTDYHSLLDKKEKERFEARQNWTSIENIKELKAGYISQVVHKICELVEKYDAVIALEDLNSGFKNSRVKVEKQVYQKFEKMLIDKLNYMVDKKSNPCATGGALKGYQITNKFESFKSMSTQNGFIFYIPAWLTSKIDPSTGFVNLLKTKYTSIADSKKFISSFDRIMYVPEEDLFEFALDYKNFSRTDADYIKKWKLYSYGNRIRIFRNPKKNNVFDWEEVCLTSAYKELFNKYGINYQQGDIRALLCEQSDKAFYSSFMALMSLMLQMRNSITGRTDVDFLISPVKNSDGIFYDSRNYEAQENAILPKNADANGAYNIARKVLWAIGQFKKAEDEKLDKVKIAISNKEWLEYAQTSVKH

SEQ ID NO: 371 - protein, 1375 aa, Synthetic construct
SKLEKFTNCYSLSKTLRFKAIPVGKTQENIDNKRLLVEDEKRAEDYKGVKKLLDRYYLSFINDVLHSIKLKNLNNYISLFRKKTRTEKENKELENLEINLRKEIAKAFKGNEGYKSLFKKDIIETILPEFLDDKDEIALVNSFNGFTTAFTGFFDNRENMFSEEAKSTSIAFRCINENLTRYISNMDIFEKVDAIFDKHEVQEIKEKILNSDYDVEDFFEGEFFNFVLTQEGIDVYNAIIGGFVTESGEKIKGLNEYINLYNQKTKQKLPKFKPLYKQVLSDRESLSFYGEGSSGENQTTQKGQKNSRERMKRIEEGIKELGSQILKEHPVENTQLQNEKLYLYYLQNGRDMYVDQELDINRLSDYDVDHIVPQSFLKDDSIDNKVLTRSDKNRGKSDNVPSEEVVKKMKNYWRQLLNAKLITQRKFDNLTKAERGGLSGYTSDEEVLEVFRNTLNKNSEIFSSIKKLEKLFKNFDEYSSAGIFVKNGPAISTISRDIFGEWNVIRDKWNAEYDDIHLKKKAVVTEKYEDDRRKSFKKIGSFSLEQLQEYADADLSVVEKLKEIIIQKVDEIYKVYGSSEKLFDADFVLEKSLKKNDAVVAIMKDLLDSVKSFENYIKAFFGEGKETNRDESFYGDFVLAYDILLKVDHIYDAIRNYVTQKPYSKDKFKLYFQNPQFMGGWDKDKETDYRATILRYGSKYYLAIMDKKYAKCLQKIDKDDVNGNYEKINYKLLPGPNKMLPKVFFSKKWMAYYNPSEDIQKIYKNGTFKKGDMFNLNDCHKLIDFFKDSISRYPKWSNAYDFNFSETEKYKDIAGFYREVEEQGYKVSFESASKKEVDKLVEEGKLYMFQIYNKDFSDKSHGTPNLHTMYFKLLFDENNHGQIRLSGGAELFMRRASLKKEELVVHPANSPIANKNPDNPKKTTTLSYDVYKDKRFSEDQYELHIPIAINKCPKNIFKINTEVRVLLKHDDNPYVIGIDRGERNLLYIVVVDGKGNIVEQYSLNEIINNFNGIRIKTDYHSLLDKKEKERFEARQNWTSIENIKELKAGYISQVVHKICELVEKYDAVIALEDLNSGFKNSRVKVEKQVYQKFEKMLIDKLNYMVDKKSNPCATGGALKGYQITNKFESFKSMSTQNGFIFYIPAWLTSKIDPSTGFVNLLKTKYTSIADSKKFISSFDRIMYVPEEDLFEFALDYKNFSRTDADYIKKWKLYSYGNRIRIFRNPKKNNVFDWEEVCLTSAYKELFNKYGINYQQGDIRALLCEQSDKAFYSSFMALMSLMLQMRNSITGRTDVDFLISPVKNSDGIFYDSRNYEAQENAILPKNADANGAYNIARKVLWAIGQFKKAEDEKLDKVKIAISNKEWLEYAQTSVKH

SEQ ID NO: 372 - protein, 1375 aa, Synthetic construct
SKLEKFTNCYSLSKTLRFKAIPVGKTQENIDNKRLLVEDEKRAEDYKGVKKLLDRYYLSFINDVLHSIKLKNLNNYISLFRKKTRTEKENKELENLEINLRKEIAKAFKGNEGYKSLFKKDIIETILPEFLDDKDEIALVNSFNGFTTAFTGFFDNRENMFSEEAKSTSIAFRCINENLTRYISNMDIFEKVDAIFDKHEVQEIKEKILNSDYDVEDFFEGEFFNFVLTQEGIDVYNAIIGGFVTESGEKIKGLNEYINLYNQKTKQKLPKFKPLYKQVLSDRESLSFYGEGSSGENQTTQKGQKNSRERMKRIEEGIKELGSQILKEHPVENTQLQNEKLYLYYLQNGRDMYVDQELDINRLSDYDVDHIVPQSFLKDDSIDNKVLTRSDKNRGKSDNVPSEEVVKKMKNYWRQLLNAKLITQRKFDNLTKAERGGLSGYTSDEEVLEVFRNTLNKNSEIFSSIKKLEKLFKNFDEYSSAGIFVKNGPAISTISKDIFGEWNVIRDKWNAEYDDIHLKKKAVVTEKYEDDRRKSFKKIGSFSLEQLQEYADADLSVVEKLKEIIIQKVDEIYKVYGSSEKLFDADFVLEKSLKKNDAVVAIMKDLLDSVKSFENYIKAFFGEGKETNRDESFYGDFVLAYDILLKVDHIYRAIRNYVTQKPYSKDKFKLYFQNPQFMGGWDKDKETDYRATILRYGSKYYLAIMDKKYAKCLQKIDKDDVNGNYEKINYKLLPGPNKMLPKVFFSKKWMAYYNPSEDIQKIYKNGTFKKGDMFNLNDCHKLIDFFKDSISRYPKWSNAYDFNFSETEKYKDIAGFYREVEEQGYKVSFESASKKEVDKLVEEGKLYMFQIYNKDFSDKSHGTPNLHTMYFKLLFDENNHGQIRLSGGAELFMRRASLKKEELVVHPANSPIANKNPDNPKKTTTLSYDVYKDKRFSEDQYELHIPIAINKCPKNIFKINTEVRVLLKHDDNPYVIGIDRGERNLLYIVVVDGKGNIVEQYSLNEIINNFNGIRIKTDYHSLLDKKEKERFEARQNWTSIENIKELKAGYISQVVHKICELVEKYDAVIALEDLNSGFKNSRVKVEKQVYQKFEKMLIDKLNYMVDKKSNPCATGGALKGYQITNKFESFKSMSTQNGFIFYIPAWLTSKIDPSTGFVNLLKTKYTSIADSKKFISSFDRIMYVPEEDLFEFALDYKNFSRTDADYIKKWKLYSYGNRIRIFRNPKKNNVFDWEEVCLTSAYKELFNKYGINYQQGDIRALLCEQSDKAFYSSFMALMSLMLQMRNSITGRTDVDFLISPVKNSDGIFYDSRNYEAQENAILPKNADANGAYNIARKVLWAIGQFKKAEDEKLDKVKIAISNKEWLEYAQTSVKH

SEQ ID NO: 373 - protein, 1375 aa, Synthetic construct
SKLEKFTNCYSLSKTLRFKAIPVGKTQENIDNKRLLVEDEKRAEDYKGVKKLLDRYYLSFINDVLHSIKLKNLNNYISLFRKKTRTEKENKELENLEINLRKEIAKAFKGNEGYKSLFKKDIIETILPEFLDDKDEIALVNSFNGFTTAFTGFFDNRENMFSEEAKSTSIAFRCINENLTRYISNMDIFEKVDAIFDKHEVQEIKEKILNSDYDVEDFFEGEFFNFVLTQEGIDVYNAIIGGFVTESGEKIKGLNEYINLYNQKTKQKLPKFKPLYKQVLSDRESLSFYGEGSSGENQTTQKGQKNSRERMKRIEEGIKELGSQILKEHPVENTQLQNEKLYLYYLQNGRDMYVDQELDINRLSDYDVDHIVPQSFLKDDSIDNKVLTRSDKNRGKSDNVPSEEVVKKMKNYWRQLLNAKLITQRKFDNLTKAERGGLSGYTSDEEVLEVFRNTLNKNSEIFSSIKKLEKLFKNFDEYSSAGIFVKNGPAISTISKDIFGEWNVIRDKWNAEYDDIHLKKKAVVTEKYEDDRRKSFKKIGSFSLEQLQEYADADLSVVEKLKEIIIQKVDEIYKVYGSSEKLFDADFVLEKSLKKNDAVVAIMKDLLDSVKSFENYIKAFFGEGKETNRDESFYGDFVLAYDILLKVDHIYDAIRRYVTQKPYSKDKFKLYFQNPQFMGGWDKDKETDYRATILRYGSKYYLAIMDKKYAKCLQKIDKDDVNGNYEKINYKLLPGPNKMLPKVFFSKKWMAYYNPSEDIQKIYKNGTFKKGDMFNLNDCHKLIDFFKDSISRYPKWSNAYDFNFSETEKYKDIAGFYREVEEQGYKVSFESASKKEVDKLVEEGKLYMFQIYNKDFSDKSHGTPNLHTMYFKLLFDENNHGQIRLSGGAELFMRRASLKKEELVVHPANSPIANKNPDNPKKTTTLSYDVYKDKRFSEDQYELHIPIAINKCPKNIFKINTEVRVLLKHDDNPYVIGIDRGERNLLYIVVVDGKGNIVEQYSLNEIINNFNGIRIKTDYHSLLDKKEKERFEARQNWTSIENIKELKAGYISQVVHKICELVEKYDAVIALEDLNSGFKNSRVKVEKQVYQKFEKMLIDKLNYMVDKKSNPCATGGALKGYQITNKFESFKSMSTQNGFIFYIPAWLTSKIDPSTGFVNLLKTKYTSIADSKKFISSFDRIMYVPEEDLFEFALDYKNFSRTDADYIKKWKLYSYGNRIRIFRNPKKNNVFDWEEVCLTSAYKELFNKYGINYQQGDIRALLCEQSDKAFYSSFMALMSLMLQMRNSITGRTDVDFLISPVKNSDGIFYDSRNYEAQENAILPKNADANGAYNIARKVLWAIGQFKKAEDEKLDKVKIAISNKEWLEYAQTSVKH

SEQ ID NO: 374 - protein, 1375 aa, Synthetic construct
SKLEKFTNCYSLSKTLRFKAIPVGKTQENIDNKRLLVEDEKRAEDYKGVKKLLDRYYLSFINDVLHSIKLKNLNNYISLFRKKTRTEKENKELENLEINLRKEIAKAFKGNEGYKSLFKKDIIETILPEFLDDKDEIALVNSFNGFTTAFTGFFDNRENMFSEEAKSTSIAFRCINENLTRYISNMDIFEKVDAIFDKHEVQEIKEKILNSDYDVEDFFEGEFFNFVLTQEGIDVYNAIIGGFVTESGEKIKGLNEYINLYNQKTKQKLPKFKPLYKQVLSDRESLSFYGEGSSGENQTTQKGQKNSRERMKRIEEGIKELGSQILKEHPVENTQLQNEKLYLYYLQNGRDMYVDQELDINRLSDYDVDHIVPQSFLKDDSIDNKVLTRSDKNRGKSDNVPSEEVVKKMKNYWRQLLNAKLITQRKFDNLTKAERGGLSGYTSDEEVLEVFRNTLNKNSEIFSSIKKLEKLFKNFDEYSSAGIFVKNGPAISTISKDIFGEWNVIRDKWNAEYDDIHLKKKAVVTEKYEDDRRKSFKKIGSFSLEQLQEYADADLSVVEKLKEIIIQKVDEIYKVYGSSEKLFDADFVLEKSLKKNDAVVAIMKDLLDSVKSFENYIKAFFGEGKETNRDESFYGDFVLAYDILLKVDHIYDAIRNYVRQKPYSKDKFKLYFQNPQFMGGWDKDKETDYRATILRYGSKYYLAIMDKKYAKCLQKIDKDDVNGNYEKINYKLLPGPNKMLPKVFFSKKWMAYYNPSEDIQKIYKNGTFKKGDMFNLNDCHKLIDFFKDSISRYPKWSNAYDFNFSETEKYKDIAGFYREVEEQGYKVSFESASKKEVDKLVEEGKLYMFQIYNKDFSDKSHGTPNLHTMYFKLLFDENNHGQIRLSGGAELFMRRASLKKEELVVHPANSPIANKNPDNPKKTTTLSYDVYKDKRFSEDQYELHIPIAINKCPKNIFKINTEVRVLLKHDDNPYVIGIDRGERNLLYIVVVDGKGNIVEQYSLNEIINNFNGIRIKTDYHSLLDKKEKERFEARQNWTSIENIKELKAGYISQVVHKICELVEKYDAVIALEDLNSGFKNSRVKVEKQVYQKFEKMLIDKLNYMVDKKSNPCATGGALKGYQITNKFESFKSMSTQNGFIFYIPAWLTSKIDPSTGFVNLLKTKYTSIADSKKFISSFDRIMYVPEEDLFEFALDYKNFSRTDADYIKKWKLYSYGNRIRIFRNPKKNNVFDWEEVCLTSAYKELFNKYGINYQQGDIRALLCEQSDKAFYSSFMALMSLMLQMRNSITGRTDVDFLISPVKNSDGIFYDSRNYEAQENAILPKNADANGAYNIARKVLWAIGQFKKAEDEKLDKVKIAISNKEWLEYAQTSVKH

SEQ ID NO: 375 - protein, 1375 aa, Synthetic construct
SKLEKFTNCYSLSKTLRFKAIPVGKTQENIDNKRLLVEDEKRAEDYKGVKKLLDRYYLSFINDVLHSIKLKNLNNYISLFRKKTRTEKENKELENLEINLRKEIAKAFKGNEGYKSLFKKDIIETILPEFLDDKDEIALVNSFNGFTTAFTGFFDNRENMFSEEAKSTSIAFRCINENLTRYISNMDIFEKVDAIFDKHEVQEIKEKILNSDYDVEDFFEGEFFNFVLTQEGIDVYNAIIGGFVTESGEKIKGLNEYINLYNQKTKQKLPKFKPLYKQVLSDRESLSFYGEGSSGENQTTQKGQKNSRERMKRIEEGIKELGSQILKEHPVENTQLQNEKLYLYYLQNGRDMYVDQELDINRLSDYDVDHIVPQSFLKDDSIDNKVLTRSDKNRGKSDNVPSEEVVKKMKNYWRQLLNAKLITQRKFDNLTKAERGGLSGYTSDEEVLEVFRNTLNKNSEIFSSIKKLEKLFKNFDEYSSAGIFVKNGPAISTISKDIFGEWNVIRDKWNAEYDDIHLKKKAVVTEKYEDDRRKSFKKIGSFSLEQLQEYADADLSVVEKLKEIIIQKVDEIYKVYGSSEKLFDADFVLEKSLKKNDAVVAIMKDLLDSVKSFENYIKAFFGEGKETNRDESFYGDFVLAYDILLKVDHIYDAIRNYVTQRPYSKDKFKLYFQNPQFMGGWDKDKETDYRATILRYGSKYYLAIMDKKYAKCLQKIDKDDVNGNYEKINYKLLPGPNKMLPKVFFSKKWMAYYNPSEDIQKIYKNGTFKKGDMFNLNDCHKLIDFFKDSISRYPKWSNAYDFNFSETEKYKDIAGFYREVEEQGYKVSFESASKKEVDKLVEEGKLYMFQIYNKDFSDKSHGTPNLHTMYFKLLFDENNHGQIRLSGGAELFMRRASLKKEELVVHPANSPIANKNPDNPKKTTTLSYDVYKDKRFSEDQYELHIPIAINKCPKNIFKINTEVRVLLKHDDNPYVIGIDRGERNLLYIVVVDGKGNIVEQYSLNEIINNFNGIRIKTDYHSLLDKKEKERFEARQNWTSIENIKELKAGYISQVVHKICELVEKYDAVIALEDLNSGFKNSRVKVEKQVYQKFEKMLIDKLNYMVDKKSNPCATGGALKGYQITNKFESFKSMSTQNGFIFYIPAWLTSKIDPSTGFVNLLKTKYTSIADSKKFISSFDRIMYVPEEDLFEFALDYKNFSRTDADYIKKWKLYSYGNRIRIFRNPKKNNVFDWEEVCLTSAYKELFNKYGINYQQGDIRALLCEQSDKAFYSSFMALMSLMLQMRNSITGRTDVDFLISPVKNSDGIFYDSRNYEAQENAILPKNADANGAYNIARKVLWAIGQFKKAEDEKLDKVKIAISNKEWLEYAQTSVKH

SEQ ID NO: 376 - protein, 1375 aa, Synthetic construct
SKLEKFTNCYSLSKTLRFKAIPVGKTQENIDNKRLLVEDEKRAEDYKGVKKLLDRYYLSFINDVLHSIKLKNLNNYISLFRKKTRTEKENKELENLEINLRKEIAKAFKGNEGYKSLFKKDIIETILPEFLDDKDEIALVNSFNGFTTAFTGFFDNRENMFSEEAKSTSIAFRCINENLTRYISNMDIFEKVDAIFDKHEVQEIKEKILNSDYDVEDFFEGEFFNFVLTQEGIDVYNAIIGGFVTESGEKIKGLNEYINLYNQKTKQKLPKFKPLYKQVLSDRESLSFYGEGSSGENQTTQKGQKNSRERMKRIEEGIKELGSQILKEHPVENTQLQNEKLYLYYLQNGRDMYVDQELDINRLSDYDVDHIVPQSFLKDDSIDNKVLTRSDKNRGKSDNVPSEEVVKKMKNYWRQLLNAKLITQRKFDNLTKAERGGLSGYTSDEEVLEVFRNTLNKNSEIFSSIKKLEKLFKNFDEYSSAGIFVKNGPAISTISKDIFGEWNVIRDKWNAEYDDIHLKKKAVVTEKYEDDRRKSFKKIGSFSLEQLQEYADADLSVVEKLKEIIIQKVDEIYKVYGSSEKLFDADFVLEKSLKKNDAVVAIMKDLLDSVKSFENYIKAFFGEGKETNRDESFYGDFVLAYDILLKVDHIYDAIRNYVTQKPYSKDKFKLYFQNPQFMGGWDKDKETDYRATILRYGSKYYLAIMDKKYAKCLQKIDKDDVNGNYEKINYKLLPGPNKMLPKVFFSKKWMAYYNPSEDIQKIYKNGTFKKGDMFNLNDCHKLIDFFKDSISRYPKWSNAYDFNFSETEKYKDIAGFYREVEEQGYKVSFESASKKEVDKLVEEGKLYMFQIYNKDFSDKSHGTPNLHTMYFKLLFDENNHGQIRLSGGAELFMRRASLKKEELVVHPANSPIANKNPDNPKKTTTLSYDVYKDKRFSEDQYELHIPIAINKCPKNIFKINTEVRVLLKHDDNPYVIGIDRGERNLLYIVVVDGKGNIVEQYSLNEIINNFNGIRIKTDYHSLLDKKEKERFEARQNWTSIERIKELKAGYISQVVHKICELVEKYDAVIALEDLNSGFKNSRVKVEKQVYQKFEKMLIDKLNYMVDKKSNPCATGGALKGYQITNKFESFKSMSTQNGFIFYIPAWLTSKIDPSTGFVNLLKTKYTSIADSKKFISSFDRIMYVPEEDLFEFALDYKNFSRTDADYIKKWKLYSYGNRIRIFRNPKKNNVFDWEEVCLTSAYKELFNKYGINYQQGDIRALLCEQSDKAFYSSFMALMSLMLQMRNSITGRTDVDFLISPVKNSDGIFYDSRNYEAQENAILPKNADANGAYNIARKVLWAIGQFKKAEDEKLDKVKIAISNKEWLEYAQTSVKH

SEQ ID NO: 377 - protein, 1375 aa, Synthetic construct
SKLEKFTNCYSLSKTLRFKAIPVGKTQENIDNKRLLVEDEKRAEDYKGVKKLLDRYYLSFINDVLHSIKLKNLNNYISLFRKKTRTEKENKELENLEINLRKEIAKAFKGNEGYKSLFKKDIIETILPEFLDDKDEIALVNSFNGFTTAFTGFFDNRENMFSEEAKSTSIAFRCINENLTRYISNMDIFEKVDAIFDKHEVQEIKEKILNSDYDVEDFFEGEFFNFVLTQEGIDVYNAIIGGFVTESGEKIKGLNEYINLYNQKTKQKLPKFKPLYKQVLSDRESLSFYGEGSSGENQTTQKGQKNSRERMKRIEEGIKELGSQILKEHPVENTQLQNEKLYLYYLQNGRDMYVDQELDINRLSDYDVDHIVPQSFLKDDSIDNKVLTRSDKNRGKSDNVPSEEVVKKMKNYWRQLLNAKLITQRKFDNLTKAERGGLSGYTSDEEVLEVFRNTLNKNSEIFSSIKKLEKLFKNFDEYSSAGIFVKNGPAISTISKDIFGEWNVIRDKWNAEYDDIHLKKKAVVTEKYEDDRRKSFKKIGSFSLEQLQEYADADLSVVEKLKEIIIQKVDEIYKVYGSSEKLFDADFVLEKSLKKNDAVVAIMKDLLDSVKSFENYIKAFFGEGKETNRDESFYGDFVLAYDILLKVDHIYDAIRNYVTQKPYSKDKFKLYFQNPQFMGGWDKDKETDYRATILRYGSKYYLAIMDKKYAKCLQKIDKDDVNGNYEKINYKLLPGPNKMLPKVFFSKKWMAYYNPSEDIQKIYKNGTFKKGDMFNLNDCHKLIDFFKDSISRYPKWSNAYDFNFSETEKYKDIAGFYREVEEQGYKVSFESASKKEVDKLVEEGKLYMFQIYNKDFSDKSHGTPNLHTMYFKLLFDENNHGQIRLSGGAELFMRRASLKKEELVVHPANSPIANKNPDNPKKTTTLSYDVYKDKRFSEDQYELHIPIAINKCPKNIFKINTEVRVLLKHDDNPYVIGIDRGERNLLYIVVVDGKGNIVEQYSLNEIINNFNGIRIKTDYHSLLDKKEKERFEARQNWTSIENIRELKAGYISQVVHKICELVEKYDAVIALEDLNSGFKNSRVKVEKQVYQKFEKMLIDKLNYMVDKKSNPCATGGALKGYQITNKFESFKSMSTQNGFIFYIPAWLTSKIDPSTGFVNLLKTKYTSIADSKKFISSFDRIMYVPEEDLFEFALDYKNFSRTDADYIKKWKLYSYGNRIRIFRNPKKNNVFDWEEVCLTSAYKELFNKYGINYQQGDIRALLCEQSDKAFYSSFMALMSLMLQMRNSITGRTDVDFLISPVKNSDGIFYDSRNYEAQENAILPKNADANGAYNIARKVLWAIGQFKKAEDEKLDKVKIAISNKEWLEYAQTSVKH

SEQ ID NO: 378 - protein, 1375 aa, Synthetic construct
SKLEKFTNCYSLSKTLRFKAIPVGKTQENIDNKRLLVEDEKRAEDYKGVKKLLDRYYLSFINDVLHSIKLKNLNNYISLFRKKTRTEKENKELENLEINLRKEIAKAFKGNEGYKSLFKKDIIETILPEFLDDKDEIALVNSFNGFTTAFTGFFDNRENMFSEEAKSTSIAFRCINENLTRYISNMDIFEKVDAIFDKHEVQEIKEKILNSDYDVEDFFEGEFFNFVLTQEGIDVYNAIIGGFVTESGEKIKGLNEYINLYNQKTKQKLPKFKPLYKQVLSDRESLSFYGEGSSGENQTTQKGQKNSRERMKRIEEGIKELGSQILKEHPVENTQLQNEKLYLYYLQNGRDMYVDQELDINRLSDYDVDHIVPQSFLKDDSIDNKVLTRSDKNRGKSDNVPSEEVVKKMKNYWRQLLNAKLITQRKFDNLTKAERGGLSGYTSDEEVLEVFRNTLNKNSEIFSSIKKLEKLFKNFDEYSSAGIFVKNGPAISTISKDIFGEWNVIRDKWNAEYDDIHLKKKAVVTEKYEDDRRKSFKKIGSFSLEQLQEYADADLSVVEKLKEIIIQKVDEIYKVYGSSEKLFDADFVLEKSLKKNDAVVAIMKDLLDSVKSFENYIKAFFGEGKETNRDESFYGDFVLAYDILLKVDHIYDAIRNYVTQKPYSKDKFKLYFQNPQFMGGWDKDKETDYRATILRYGSKYYLAIMDKKYAKCLQKIDKDDVNGNYEKINYKLLPGPNKMLPKVFFSKKWMAYYNPSEDIQKIYKNGTFKKGDMFNLNDCHKLIDFFKDSISRYPKWSNAYDFNFSETEKYKDIAGFYREVEEQGYKVSFESASKKEVDKLVEEGKLYMFQIYNKDFSDKSHGTPNLHTMYFKLLFDENNHGQIRLSGGAELFMRRASLKKEELVVHPANSPIANKNPDNPKKTTTLSYDVYKDKRFSEDQYELHIPIAINKCPKNIFKINTEVRVLLKHDDNPYVIGIDRGERNLLYIVVVDGKGNIVEQYSLNEIINNFNGIRIKTDYHSLLDKKEKERFEARQNWTSIENIKELKAGYISQVVHKICELVEKYDAVIALEDLNSGFKNSRVKVEKQVYRKFEKMLIDKLNYMVDKKSNPCATGGALKGYQITNKFESFKSMSTQNGFIFYIPAWLTSKIDPSTGFVNLLKTKYTSIADSKKFISSFDRIMYVPEEDLFEFALDYKNFSRTDADYIKKWKLYSYGNRIRIFRNPKKNNVFDWEEVCLTSAYKELFNKYGINYQQGDIRALLCEQSDKAFYSSFMALMSLMLQMRNSITGRTDVDFLISPVKNSDGIFYDSRNYEAQENAILPKNADANGAYNIARKVLWAIGQFKKAEDEKLDKVKIAISNKEWLEYAQTSVKH

SEQ ID NO: 379 - protein, 1375 aa, Synthetic construct
SKLEKFTNCYSLSKTLRFKAIPVGKTQENIDNKRLLVEDEKRAEDYKGVKKLLDRYYLSFINDVLHSIKLKNLNNYISLFRKKTRTEKENKELENLEINLRKEIAKAFKGNEGYKSLFKKDIIETILPEFLDDKDEIALVNSFNGFTTAFTGFFDNRENMFSEEAKSTSIAFRCINENLTRYISNMDIFEKVDAIFDKHEVQEIKEKILNSDYDVEDFFEGEFFNFVLTQEGIDVYNAIIGGFVTESGEKIKGLNEYINLYNQKTKQKLPKFKPLYKQVLSDRESLSFYGEGSSGENQTTQKGQKNSRERMKRIEEGIKELGSQILKEHPVENTQLQNEKLYLYYLQNGRDMYVDQELDINRLSDYDVDHIVPQSFLKDDSIDNKVLTRSDKNRGKSDNVPSEEVVKKMKNYWRQLLNAKLITQRKFDNLTKAERGGLSGYTSDEEVLEVFRNTLNKNSEIFSSIKKLEKLFKNFDEYSSAGIFVKNGPAISTISKDIFGEWNVIRDKWNAEYDDIHLKKKAVVTEKYEDDRRKSFKKIGSFSLEQLQEYADADLSVVEKLKEIIIQKVDEIYKVYGSSEKLFDADFVLEKSLKKNDAVVAIMKDLLDSVKSFENYIKAFFGEGKETNRDESFYGDFVLAYDILLKVDHIYDAIRNYVTQKPYSKDKFKLYFQNPQFMGGWDKDKETDYRATILRYGSKYYLAIMDKKYAKCLQKIDKDDVNGNYEKINYKLLPGPNKMLPKVFFSKKWMAYYNPSEDIQKIYKNGTFKKGDMFNLNDCHKLIDFFKDSISRYPKWSNAYDFNFSETEKYKDIAGFYREVEEQGYKVSFESASKKEVDKLVEEGKLYMFQIYNKDFSDKSHGTPNLHTMYFKLLFDENNHGQIRLSGGAELFMRRASLKKEELVVHPANSPIANKNPDNPKKTTTLSYDVYKDKRFSEDQYELHIPIAINKCPKNIFKINTEVRVLLKHDDNPYVIGIDRGERNLLYIVVVDGKGNIVEQYSLNEIINNFNGIRIKTDYHSLLDKKEKERFEARQNWTSIENIKELKAGYISQVVHKICELVEKYDAVIALEDLNSGFKNSRVKVEKQVYQRFEKMLIDKLNYMVDKKSNPCATGGALKGYQITNKFESFKSMSTQNGFIFYIPAWLTSKIDPSTGFVNLLKTKYTSIADSKKFISSFDRIMYVPEEDLFEFALDYKNFSRTDADYIKKWKLYSYGNRIRIFRNPKKNNVFDWEEVCLTSAYKELFNKYGINYQQGDIRALLCEQSDKAFYSSFMALMSLMLQMRNSITGRTDVDFLISPVKNSDGIFYDSRNYEAQENAILPKNADANGAYNIARKVLWAIGQFKKAEDEKLDKVKIAISNKEWLEYAQTSVKH

SEQ ID NO: 380 - protein, 1375 aa, Synthetic construct
SKLEKFTNCYSLSKTLRFKAIPVGKTQENIDNKRLLVEDEKRAEDYKGVKKLLDRYYLSFINDVLHSIKLKNLNNYISLFRKKTRTEKENKELENLEINLRKEIAKAFKGNEGYKSLFKKDIIETILPEFLDDKDEIALVNSFNGFTTAFTGFFDNRENMFSEEAKSTSIAFRCINENLTRYISNMDIFEKVDAIFDKHEVQEIKEKILNSDYDVEDFFEGEFFNFVLTQEGIDVYNAIIGGFVTESGEKIKGLNEYINLYNQKTKQKLPKFKPLYKQVLSDRESLSFYGEGSSGENQTTQKGQKNSRERMKRIEEGIKELGSQILKEHPVENTQLQNEKLYLYYLQNGRDMYVDQELDINRLSDYDVDHIVPQSFLKDDSIDNKVLTRSDKNRGKSDNVPSEEVVKKMKNYWRQLLNAKLITQRKFDNLTKAERGGLSGYTSDEEVLEVFRNTLNKNSEIFSSIKKLEKLFKNFDEYSSAGIFVKNGPAISTISKDIFGEWNVIRDKWNAEYDDIHLKKKAVVTEKYEDDRRKSFKKIGSFSLEQLQEYADADLSVVEKLKEIIIQKVDEIYKVYGSSEKLFDADFVLEKSLKKNDAVVAIMKDLLDSVKSFENYIKAFFGEGKETNRDESFYGDFVLAYDILLKVDHIYDAIRNYVTQKPYSKDKFKLYFQNPQFMGGWDKDKETDYRATILRYGSKYYLAIMDKKYAKCLQKIDKDDVNGNYEKINYKLLPGPNKMLPKVFFSKKWMAYYNPSEDIQKIYKNGTFKKGDMFNLNDCHKLIDFFKDSISRYPKWSNAYDFNFSETEKYKDIAGFYREVEEQGYKVSFESASKKEVDKLVEEGKLYMFQIYNKDFSDKSHGTPNLHTMYFKLLFDENNHGQIRLSGGAELFMRRASLKKEELVVHPANSPIANKNPDNPKKTTTLSYDVYKDKRFSEDQYELHIPIAINKCPKNIFKINTEVRVLLKHDDNPYVIGIDRGERNLLYIVVVDGKGNIVEQYSLNEIINNFNGIRIKTDYHSLLDKKEKERFEARQNWTSIENIKELKAGYISQVVHKICELVEKYDAVIALEDLNSGFKNSRVKVEKQVYQKFERMLIDKLNYMVDKKSNPCATGGALKGYQITNKFESFKSMSTQNGFIFYIPAWLTSKIDPSTGFVNLLKTKYTSIADSKKFISSFDRIMYVPEEDLFEFALDYKNFSRTDADYIKKWKLYSYGNRIRIFRNPKKNNVFDWEEVCLTSAYKELFNKYGINYQQGDIRALLCEQSDKAFYSSFMALMSLMLQMRNSITGRTDVDFLISPVKNSDGIFYDSRNYEAQENAILPKNADANGAYNIARKVLWAIGQFKKAEDEKLDKVKIAISNKEWLEYAQTSVKH

SEQ ID NO: 381 - protein, 1375 aa, Synthetic construct
SKLEKFTNCYSLSKTLRFKAIPVGKTQENIDNKRLLVEDEKRAEDYKGVKKLLDRYYLSFINDVLHSIKLKNLNNYISLFRKKTRTEKENKELENLEINLRKEIAKAFKGNEGYKSLFKKDIIETILPEFLDDKDEIALVNSFNGFTTAFTGFFDNRENMFSEEAKSTSIAFRCINENLTRYISNMDIFEKVDAIFDKHEVQEIKEKILNSDYDVEDFFEGEFFNFVLTQEGIDVYNAIIGGFVTESGEKIKGLNEYINLYNQKTKQKLPKFKPLYKQVLSDRESLSFYGEGSSGENQTTQKGQKNSRERMKRIEEGIKELGSQILKEHPVENTQLQNEKLYLYYLQNGRDMYVDQELDINRLSDYDVDHIVPQSFLKDDSIDNKVLTRSDKNRGKSDNVPSEEVVKKMKNYWRQLLNAKLITQRKFDNLTKAERGGLSGYTSDEEVLEVFRNTLNKNSEIFSSIKKLEKLFKNFDEYSSAGIFVKNGPAISTISKDIFGEWNVIRDKWNAEYDDIHLKKKAVVTEKYEDDRRKSFKKIGSFSLEQLQEYADADLSVVEKLKEIIIQKVDEIYKVYGSSEKLFDADFVLEKSLKKNDAVVAIMKDLLDSVKSFENYIKAFFGEGKETNRDESFYGDFVLAYDILLKVDHIYDAIRNYVTQKPYSKDKFKLYFQNPQFMGGWDKDKETDYRATILRYGSKYYLAIMDKKYAKCLQKIDKDDVNGNYEKINYKLLPGPNKMLPKVFFSKKWMAYYNPSEDIQKIYKNGTFKKGDMFNLNDCHKLIDFFKDSISRYPKWSNAYDFNFSETEKYKDIAGFYREVEEQGYKVSFESASKKEVDKLVEEGKLYMFQIYNKDFSDKSHGTPNLHTMYFKLLFDENNHGQIRLSGGAELFMRRASLKKEELVVHPANSPIANKNPDNPKKTTTLSYDVYKDKRFSEDQYELHIPIAINKCPKNIFKINTEVRVLLKHDDNPYVIGIDRGERNLLYIVVVDGKGNIVEQYSLNEIINNFNGIRIKTDYHSLLDKKEKERFEARQNWTSIENIKELKAGYISQVVHKICELVEKYDAVIALEDLNSGFKNSRVKVEKQVYQKFEKMLIDKLNYMVDKKSNPCATGGALKGYQITNRFESFKSMSTQNGFIFYIPAWLTSKIDPSTGFVNLLKTKYTSIADSKKFISSFDRIMYVPEEDLFEFALDYKNFSRTDADYIKKWKLYSYGNRIRIFRNPKKNNVFDWEEVCLTSAYKELFNKYGINYQQGDIRALLCEQSDKAFYSSFMALMSLMLQMRNSITGRTDVDFLISPVKNSDGIFYDSRNYEAQENAILPKNADANGAYNIARKVLWAIGQFKKAEDEKLDKVKIAISNKEWLEYAQTSVKH

SEQ ID NO: 382 - protein, 1375 aa, Synthetic construct
SKLEKFTNCYSLSKTLRFKAIPVGKTQENIDNKRLLVEDEKRAEDYKGVKKLLDRYYLSFINDVLHSIKLKNLNNYISLFRKKTRTEKENKELENLEINLRKEIAKAFKGNEGYKSLFKKDIIETILPEFLDDKDEIALVNSFNGFTTAFTGFFDNRENMFSEEAKSTSIAFRCINENLTRYISNMDIFEKVDAIFDKHEVQEIKEKILNSDYDVEDFFEGEFFNFVLTQEGIDVYNAIIGGFVTESGEKIKGLNEYINLYNQKTKQKLPKFKPLYKQVLSDRESLSFYGEGSSGENQTTQKGQKNSRERMKRIEEGIKELGSQILKEHPVENTQLQNEKLYLYYLQNGRDMYVDQELDINRLSDYDVDHIVPQSFLKDDSIDNKVLTRSDKNRGKSDNVPSEEVVKKMKNYWRQLLNAKLITQRKFDNLTKAERGGLSGYTSDEEVLEVFRNTLNKNSEIFSSIKKLEKLFKNFDEYSSAGIFVKNGPAISTISKDIFGEWNVIRDKWNAEYDDIHLKKKAVVTEKYEDDRRKSFKKIGSFSLEQLQEYADADLSVVEKLKEIIIQKVDEIYKVYGSSEKLFDADFVLEKSLKKNDAVVAIMKDLLDSVKSFENYIKAFFGEGKETNRDESFYGDFVLAYDILLKVDHIYDAIRNYVTQKPYSKDKFKLYFQNPQFMGGWDKDKETDYRATILRYGSKYYLAIMDKKYAKCLQKIDKDDVNGNYEKINYKLLPGPNKMLPKVFFSKKWMAYYNPSEDIQKIYKNGTFKKGDMFNLNDCHKLIDFFKDSISRYPKWSNAYDFNFSETEKYKDIAGFYREVEEQGYKVSFESASKKEVDKLVEEGKLYMFQIYNKDFSDKSHGTPNLHTMYFKLLFDENNHGQIRLSGGAELFMRRASLKKEELVVHPANSPIANKNPDNPKKTTTLSYDVYKDKRFSEDQYELHIPIAINKCPKNIFKINTEVRVLLKHDDNPYVIGIDRGERNLLYIVVVDGKGNIVEQYSLNEIINNFNGIRIKTDYHSLLDKKEKERFEARQNWTSIENIKELKAGYISQVVHKICELVEKYDAVIALEDLNSGFKNSRVKVEKQVYQKFEKMLIDKLNYMVDKKSNPCATGGALKGYQITNKFRSFKSMSTQNGFIFYIPAWLTSKIDPSTGFVNLLKTKYTSIADSKKFISSFDRIMYVPEEDLFEFALDYKNFSRTDADYIKKWKLYSYGNRIRIFRNPKKNNVFDWEEVCLTSAYKELFNKYGINYQQGDIRALLCEQSDKAFYSSFMALMSLMLQMRNSITGRTDVDFLISPVKNSDGIFYDSRNYEAQENAILPKNADANGAYNIARKVLWAIGQFKKAEDEKLDKVKIAISNKEWLEYAQTSVKH

SEQ ID NO: 383 - protein, 1375 aa, Synthetic construct
SKLEKFTNCYSLSKTLRFKAIPVGKTQENIDNKRLLVEDEKRAEDYKGVKKLLDRYYLSFINDVLHSIKLKNLNNYISLFRKKTRTEKENKELENLEINLRKEIAKAFKGNEGYKSLFKKDIIETILPEFLDDKDEIALVNSFNGFTTAFTGFFDNRENMFSEEAKSTSIAFRCINENLTRYISNMDIFEKVDAIFDKHEVQEIKEKILNSDYDVEDFFEGEFFNFVLTQEGIDVYNAIIGGFVTESGEKIKGLNEYINLYNQKTKQKLPKFKPLYKQVLSDRESLSFYGEGSSGENQTTQKGQKNSRERMKRIEEGIKELGSQILKEHPVENTQLQNEKLYLYYLQNGRDMYVDQELDINRLSDYDVDHIVPQSFLKDDSIDNKVLTRSDKNRGKSDNVPSEEVVKKMKNYWRQLLNAKLITQRKFDNLTKAERGGLSGYTSDEEVLEVFRNTLNKNSEIFSSIKKLEKLFKNFDEYSSAGIFVKNGPAISTISKDIFGEWNVIRDKWNAEYDDIHLKKKAVVTEKYEDDRRKSFKKIGSFSLEQLQEYADADLSVVEKLKEIIIQKVDEIYKVYGSSEKLFDADFVLEKSLKKNDAVVAIMKDLLDSVKSFENYIKAFFGEGKETNRDESFYGDFVLAYDILLKVDHIYDAIRNYVTQKPYSKDKFKLYFQNPQFMGGWDKDKETDYRATILRYGSKYYLAIMDKKYAKCLQKIDKDDVNGNYEKINYKLLPGPNKMLPKVFFSKKWMAYYNPSEDIQKIYKNGTFKKGDMFNLNDCHKLIDFFKDSISRYPKWSNAYDFNFSETEKYKDIAGFYREVEEQGYKVSFESASKKEVDKLVEEGKLYMFQIYNKDFSDKSHGTPNLHTMYFKLLFDENNHGQIRLSGGAELFMRRASLKKEELVVHPANSPIANKNPDNPKKTTTLSYDVYKDKRFSEDQYELHIPIAINKCPKNIFKINTEVRVLLKHDDNPYVIGIDRGERNLLYIVVVDGKGNIVEQYSLNEIINNFNGIRIKTDYHSLLDKKEKERFEARQNWTSIENIKELKAGYISQVVHKICELVEKYDAVIALEDLNSGFKNSRVKVEKQVYQKFEKMLIDKLNYMVDKKSNPCATGGALKGYQITNKFERFKSMSTQNGFIFYIPAWLTSKIDPSTGFVNLLKTKYTSIADSKKFISSFDRIMYVPEEDLFEFALDYKNFSRTDADYIKKWKLYSYGNRIRIFRNPKKNNVFDWEEVCLTSAYKELFNKYGINYQQGDIRALLCEQSDKAFYSSFMALMSLMLQMRNSITGRTDVDFLISPVKNSDGIFYDSRNYEAQENAILPKNADANGAYNIARKVLWAIGQFKKAEDEKLDKVKIAISNKEWLEYAQTSVKH

SEQ ID NO: 384 - protein, 1375 aa, Synthetic construct
SKLEKFTNCYSLSKTLRFKAIPVGKTQENIDNKRLLVEDEKRAEDYKGVKKLLDRYYLSFINDVLHSIKLKNLNNYISLFRKKTRTEKENKELENLEINLRKEIAKAFKGNEGYKSLFKKDIIETILPEFLDDKDEIALVNSFNGFTTAFTGFFDNRENMFSEEAKSTSIAFRCINENLTRYISNMDIFEKVDAIFDKHEVQEIKEKILNSDYDVEDFFEGEFFNFVLTQEGIDVYNAIIGGFVTESGEKIKGLNEYINLYNQKTKQKLPKFKPLYKQVLSDRESLSFYGEGSSGENQTTQKGQKNSRERMKRIEEGIKELGSQILKEHPVENTQLQNEKLYLYYLQNGRDMYVDQELDINRLSDYDVDHIVPQSFLKDDSIDNKVLTRSDKNRGKSDNVPSEEVVKKMKNYWRQLLNAKLITQRKFDNLTKAERGGLSGYTSDEEVLEVFRNTLNKNSEIFSSIKKLEKLFKNFDEYSSAGIFVKNGPAISTISKDIFGEWNVIRDKWNAEYDDIHLKKKAVVTEKYEDDRRKSFKKIGSFSLEQLQEYADADLSVVEKLKEIIIQKVDEIYKVYGSSEKLFDADFVLEKSLKKNDAVVAIMKDLLDSVKSFENYIKAFFGEGKETNRDESFYGDFVLAYDILLKVDHIYDAIRNYVTQKPYSKDKFKLYFQNPQFMGGWDKDKETDYRATILRYGSKYYLAIMDKKYAKCLQKIDKDDVNGNYEKINYKLLPGPNKMLPKVFFSKKWMAYYNPSEDIQKIYKNGTFKKGDMFNLNDCHKLIDFFKDSISRYPKWSNAYDFNFSETEKYKDIAGFYREVEEQGYKVSFESASKKEVDKLVEEGKLYMFQIYNKDFSDKSHGTPNLHTMYFKLLFDENNHGQIRLSGGAELFMRRASLKKEELVVHPANSPIANKNPDNPKKTTTLSYDVYKDKRFSEDQYELHIPIAINKCPKNIFKINTEVRVLLKHDDNPYVIGIDRGERNLLYIVVVDGKGNIVEQYSLNEIINNFNGIRIKTDYHSLLDKKEKERFEARQNWTSIENIKELKAGYISQVVHKICELVEKYDAVIALEDLNSGFKNSRVKVEKQVYQKFEKMLIDKLNYMVDKKSNPCATGGALKGYQITNKFESFRSMSTQNGFIFYIPAWLTSKIDPSTGFVNLLKTKYTSIADSKKFISSFDRIMYVPEEDLFEFALDYKNFSRTDADYIKKWKLYSYGNRIRIFRNPKKNNVFDWEEVCLTSAYKELFNKYGINYQQGDIRALLCEQSDKAFYSSFMALMSLMLQMRNSITGRTDVDFLISPVKNSDGIFYDSRNYEAQENAILPKNADANGAYNIARKVLWAIGQFKKAEDEKLDKVKIAISNKEWLEYAQTSVKH

SEQ ID NO: 385 - protein, 1375 aa, Synthetic construct
SKLEKFTNCYSLSKTLRFKAIPVGKTQENIDNKRLLVEDEKRAEDYKGVKKLLDRYYLSFINDVLHSIKLKNLNNYISLFRKKTRTEKENKELENLEINLRKEIAKAFKGNEGYKSLFKKDIIETILPEFLDDKDEIALVNSFNGFTTAFTGFFDNRENMFSEEAKSTSIAFRCINENLTRYISNMDIFEKVDAIFDKHEVQEIKEKILNSDYDVEDFFEGEFFNFVLTQEGIDVYNAIIGGFVTESGEKIKGLNEYINLYNQKTKQKLPKFKPLYKQVLSDRESLSFYGEGSSGENQTTQKGQKNSRERMKRIEEGIKELGSQILKEHPVENTQLQNEKLYLYYLQNGRDMYVDQELDINRLSDYDVDHIVPQSFLKDDSIDNKVLTRSDKNRGKSDNVPSEEVVKKMKNYWRQLLNAKLITQRKFDNLTKAERGGLSGYTSDEEVLEVFRNTLNKNSEIFSSIKKLEKLFKNFDEYSSAGIFVKNGPAISTISKDIFGEWNVIRDKWNAEYDDIHLKKKAVVTEKYEDDRRKSFKKIGSFSLEQLQEYADADLSVVEKLKEIIIQKVDEIYKVYGSSEKLFDADFVLEKSLKKNDAVVAIMKDLLDSVKSFENYIKAFFGEGKETNRDESFYGDFVLAYDILLKVDHIYDAIRNYVTQKPYSKDKFKLYFQNPQFMGGWDKDKETDYRATILRYGSKYYLAIMDKKYAKCLQKIDKDDVNGNYEKINYKLLPGPNKMLPKVFFSKKWMAYYNPSEDIQKIYKNGTFKKGDMFNLNDCHKLIDFFKDSISRYPKWSNAYDFNFSETEKYKDIAGFYREVEEQGYKVSFESASKKEVDKLVEEGKLYMFQIYNKDFSDKSHGTPNLHTMYFKLLFDENNHGQIRLSGGAELFMRRASLKKEELVVHPANSPIANKNPDNPKKTTTLSYDVYKDKRFSEDQYELHIPIAINKCPKNIFKINTEVRVLLKHDDNPYVIGIDRGERNLLYIVVVDGKGNIVEQYSLNEIINNFNGIRIKTDYHSLLDKKEKERFEARQNWTSIENIKELKAGYISQVVHKICELVEKYDAVIALEDLNSGFKNSRVKVEKQVYQKFEKMLIDKLNYMVDKKSNPCATGGALKGYQITNKFESFKRMSTQNGFIFYIPAWLTSKIDPSTGFVNLLKTKYTSIADSKKFISSFDRIMYVPEEDLFEFALDYKNFSRTDADYIKKWKLYSYGNRIRIFRNPKKNNVFDWEEVCLTSAYKELFNKYGINYQQGDIRALLCEQSDKAFYSSFMALMSLMLQMRNSITGRTDVDFLISPVKNSDGIFYDSRNYEAQENAILPKNADANGAYNIARKVLWAIGQFKKAEDEKLDKVKIAISNKEWLEYAQTSVKH

SEQ ID NO: 386 - protein, 1376 aa, Synthetic construct
MSKLEKFTNCYSLSKTLRFKAIPVGKTQENIDNKRLLVEDEKRAEDYKGVKKLLDRYYLSFINDVLHSIKLKNLNNYISLFRKKTRTEKENKELENLEINLRKEIAKAFKGNEGYKSLFKKDIIETILPEFLDDKDEIALVNSFNGFTTAFTGFFDNRENMFSEEAKSTSIAFRCINENLTRYISNMDIFEKVDAIFDKHEVQEIKEKILNSDYDVEDFFEGEFFNFVLTQEGIDVYNAIIGGFVTESGEKIKGLNEYINLYNQKTKQKLPKFKPLYKQVLSDRESLSFYGEGSSGENQTTQKGQKNSRERMKRIEEGIKELGSQILKEHPVENTQLQNEKLYLYYLQNGRDMYVDQELDINRLSDYDVDHIVPQSFLKDDSIDNKVLTRSDKNRGKSDNVPSEEVVKKMKNYWRQLLNAKLITQRKFDNLTKAERGGLSGYTSDEEVLEVFRNTLNKNSEIFSSIKKLEKLFKNFDEYSSAGIFVKNGPAISTISKDIFGEWNVIRDKWNAEYDDIHLKKKAVVTEKYEDDRRKSFKKIGSFSLEQLQEYADADLSVVEKLKEIIIQKVDEIYKVYGSSEKLFDADFVLEKSLKKNDAVVAIMKDLLDSVKSFENYIKAFFGEGKETNRDESFYGDFVLAYDILLKVDHIYDAIRNYVTQKPYSKDKFKLYFQNPQFMGGWDKDKETDYRATILRYGSKYYLAIMDKKYAKCLQKIDKDDVNGNYEKINYKLLPGPNKMLPKVFFSKKWMAYYNPSEDIQKIYKNGTFKKGDMFNLNDCHKLIDFFKDSISRYPKWSNAYDFNFSETEKYKDIAGFYREVEEQGYKVSFESASKKEVDKLVEEGKLYMFQIYNKDFSDKSHGTPNLHTMYFKLLFDENNHGQIRLSGGAELFMRRASLKKEELVVHPANSPIANKNPDNPKKTTTLSYDVYKDKRFSEDQYELHIPIAINKCPKNIFKINTEVRVLLKHDDNPYVIGIDRGERNLLYIVVVDGKGNIVEQYSLNEIINNFNGIRIKTDYHSLLDKKEKERFEARQNWTSIENIKELKAGYISQVVHKICELVEKYDAVIALEDLNSGFKNSRVKVEKQVYQKFEKMLIDKLNYMVDKKSNPCATGGALKGYQITNKFESFKSMSTQNGFIFYIPAWLTSKIDPSTGFVNLLKTKYTSIADSKKFISSFDRIMYVPEEDLFEFALDYKNFSRTDADYIKKWKLYSYGNRIRIFRNPKKNNVFDWEEVCLTSAYKELFNKYGINYQQGDIRALLCEQSDKAFYSSFMALMSLMLQMRNSITGRTDVDFLISPVKNSDGIFYDSRNYEAQENAILPKNADANGAYNIARKVLWAIGQFKKAEDEKLDKVKIAISNKEWLEYAQTSVKH

SEQ ID NO: 387 - protein, 1376 aa, Synthetic construct
MSKLEKFTNCYSLRKTLRFKAIPVGKTQENIDNKRLLVEDEKRAEDYKGVKKLLDRYYLSFINDVLHSIKLKNLNNYISLFRKKTRTEKENKELENLEINLRKEIAKAFKGNEGYKSLFKKDIIETILPEFLDDKDEIALVNSFNGFTTAFTGFFDNRENMFSEEAKSTSIAFRCINENLTRYISNMDIFEKVDAIFDKHEVQEIKEKILNSDYDVEDFFEGEFFNFVLTQEGIDVYNAIIGGFVTESGEKIKGLNEYINLYNQKTKQKLPKFKPLYKQVLSDRESLSFYGEGSSGENQTTQKGQKNSRERMKRIEEGIKELGSQILKEHPVENTQLQNEKLYLYYLQNGRDMYVDQELDINRLSDYDVDHIVPQSFLKDDSIDNKVLTRSDKNRGKSDNVPSEEVVKKMKNYWRQLLNAKLITQRKFDNLTKAERGGLSGYTSDEEVLEVFRNTLNKNSEIFSSIKKLEKLFKNFDEYSSAGIFVKNGPAISTISKDIFGEWNVIRDKWNAEYDDIHLKKKAVVTEKYEDDRRKSFKKIGSFSLEQLQEYADADLSVVEKLKEIIIQKVDEIYKVYGSSEKLFDADFVLEKSLKKNDAVVAIMKDLLDSVKSFENYIKAFFGEGKETNRDESFYGDFVLAYDILLKVDHIYDAIRNYVTQKPYSKDKFKLYFQNPQFMGGWDKDKETDYRATILRYGSKYYLAIMDKKYAKCLQKIDKDDVNGNYEKINYKLLPGPNKMLPKVFFSKKWMAYYNPSEDIQKIYKNGTFKKGDMFNLNDCHKLIDFFKDSISRYPKWSNAYDFNFSETEKYKDIAGFYREVEEQGYKVSFESASKKEVDKLVEEGKLYMFQIYNKDFSDKSHGTPNLHTMYFKLLFDENNHGQIRLSGGAELFMRRASLKKEELVVHPANSPIANKNPDNPKKTTTLSYDVYKDKRFSEDQYELHIPIAINKCPKNIFKINTEVRVLLKHDDNPYVIGIDRGERNLLYIVVVDGKGNIVEQYSLNEIINNFNGIRIKTDYHSLLDKKEKERFEARQNWTSIENIKELKAGYISQVVHKICELVEKYDAVIALEDLNSGFKNSRVKVEKQVYQKFEKMLIDKLNYMVDKKSNPCATGGALKGYQITNKFESFKSMSTQNGFIFYIPAWLTSKIDPSTGFVNLLKTKYTSIADSKKFISSFDRIMYVPEEDLFEFALDYKNFSRTDADYIKKWKLYSYGNRIRIFRNPKKNNVFDWEEVCLTSAYKELFNKYGINYQQGDIRALLCEQSDKAFYSSFMALMSLMLQMRNSITGRTDVDFLISPVKNSDGIFYDSRNYEAQENAILPKNADANGAYNIARKVLWAIGQFKKAEDEKLDKVKIAISNKEWLEYAQTSVKH

SEQ ID NO: 388 - protein, 1376 aa, Synthetic construct
MSKLEKFTNCYSLSKTLRFKAIPVGKTQENIDNKRLLVEDEKRAEDYKGVKKLLDRYYLSFINDVLHSIKLKNLNNYISLFRKKTRTEKENKELENLEINLRKEIAKAFKGNEGYKSLFKKDIIETILPEFLDDKDEIALVNSFNGFTTAFRGFFDNRENMFSEEAKSTSIAFRCINENLTRYISNMDIFEKVDAIFDKHEVQEIKEKILNSDYDVEDFFEGEFFNFVLTQEGIDVYNAIIGGFVTESGEKIKGLNEYINLYNQKTKQKLPKFKPLYKQVLSDRESLSFYGEGSSGENQTTQKGQKNSRERMKRIEEGIKELGSQILKEHPVENTQLQNEKLYLYYLQNGRDMYVDQELDINRLSDYDVDHIVPQSFLKDDSIDNKVLTRSDKNRGKSDNVPSEEVVKKMKNYWRQLLNAKLITQRKFDNLTKAERGGLSGYTSDEEVLEVFRNTLNKNSEIFSSIKKLEKLFKNFDEYSSAGIFVKNGPAISTISKDIFGEWNVIRDKWNAEYDDIHLKKKAVVTEKYEDDRRKSFKKIGSFSLEQLQEYADADLSVVEKLKEIIIQKVDEIYKVYGSSEKLFDADFVLEKSLKKNDAVVAIMKDLLDSVKSFENYIKAFFGEGKETNRDESFYGDFVLAYDILLKVDHIYDAIRNYVTQKPYSKDKFKLYFQNPQFMGGWDKDKETDYRATILRYGSKYYLAIMDKKYAKCLQKIDKDDVNGNYEKINYKLLPGPNKMLPKVFFSKKWMAYYNPSEDIQKIYKNGTFKKGDMFNLNDCHKLIDFFKDSISRYPKWSNAYDFNFSETEKYKDIAGFYREVEEQGYKVSFESASKKEVDKLVEEGKLYMFQIYNKDFSDKSHGTPNLHTMYFKLLFDENNHGQIRLSGGAELFMRRASLKKEELVVHPANSPIANKNPDNPKKTTTLSYDVYKDKRFSEDQYELHIPIAINKCPKNIFKINTEVRVLLKHDDNPYVIGIDRGERNLLYIVVVDGKGNIVEQYSLNEIINNFNGIRIKTDYHSLLDKKEKERFEARQNWTSIENIKELKAGYISQVVHKICELVEKYDAVIALEDLNSGFKNSRVKVEKQVYQKFEKMLIDKLNYMVDKKSNPCATGGALKGYQITNKFESFKSMSTQNGFIFYIPAWLTSKIDPSTGFVNLLKTKYTSIADSKKFISSFDRIMYVPEEDLFEFALDYKNFSRTDADYIKKWKLYSYGNRIRIFRNPKKNNVFDWEEVCLTSAYKELFNKYGINYQQGDIRALLCEQSDKAFYSSFMALMSLMLQMRNSITGRTDVDFLISPVKNSDGIFYDSRNYEAQENAILPKNADANGAYNIARKVLWAIGQFKKAEDEKLDKVKIAISNKEWLEYAQTSVKH

SEQ ID NO: 389 - protein, 1376 aa, Synthetic construct; identical to SEQ ID NO: 348

SEQ ID NO: 390 - protein, 1376 aa, Synthetic construct
MSKLEKFTNCYSLSKTLRFKAIPVGKTQENIDNKRLLVEDEKRAEDYKGVKKLLDRYYLSFINDVLHSIKLKNLNNYISLFRKKTRTEKENKELENLEINLRKEIAKAFKGNEGYKSLFKKDIIETILPEFLDDKDEIALVNSFNGFTTAFTGFFDRRENMFSEEAKSTSIAFRCINENLTRYISNMDIFEKVDAIFDKHEVQEIKEKILNSDYDVEDFFEGEFFNFVLTQEGIDVYNAIIGGFVTESGEKIKGLNEYINLYNQKTKQKLPKFKPLYKQVLSDRESLSFYGEGSSGENQTTQKGQKNSRERMKRIEEGIKELGSQILKEHPVENTQLQNEKLYLYYLQNGRDMYVDQELDINRLSDYDVDHIVPQSFLKDDSIDNKVLTRSDKNRGKSDNVPSEEVVKKMKNYWRQLLNAKLITQRKFDNLTKAERGGLSGYTSDEEVLEVFRNTLNKNSEIFSSIKKLEKLFKNFDEYSSAGIFVKNGPAISTISKDIFGEWNVIRDKWNAEYDDIHLKKKAVVTEKYEDDRRKSFKKIGSFSLEQLQEYADADLSVVEKLKEIIIQKVDEIYKVYGSSEKLFDADFVLEKSLKKNDAVVAIMKDLLDSVKSFENYIKAFFGEGKETNRDESFYGDFVLAYDILLKVDHIYDAIRNYVTQKPYSKDKFKLYFQNPQFMGGWDKDKETDYRATILRYGSKYYLAIMDKKYAKCLQKIDKDDVNGNYEKINYKLLPGPNKMLPKVFFSKKWMAYYNPSEDIQKIYKNGTFKKGDMFNLNDCHKLIDFFKDSISRYPKWSNAYDFNFSETEKYKDIAGFYREVEEQGYKVSFESASKKEVDKLVEEGKLYMFQIYNKDFSDKSHGTPNLHTMYFKLLFDENNHGQIRLSGGAELFMRRASLKKEELVVHPANSPIANKNPDNPKKTTTLSYDVYKDKRFSEDQYELHIPIAINKCPKNIFKINTEVRVLLKHDDNPYVIGIDRGERNLLYIVVVDGKGNIVEQYSLNEIINNFNGIRIKTDYHSLLDKKEKERFEARQNWTSIENIKELKAGYISQVVHKICELVEKYDAVIALEDLNSGFKNSRVKVEKQVYQKFEKMLIDKLNYMVDKKSNPCATGGALKGYQITNKFESFKSMSTQNGFIFYIPAWLTSKIDPSTGFVNLLKTKYTSIADSKKFISSFDRIMYVPEEDLFEFALDYKNFSRTDADYIKKWKLYSYGNRIRIFRNPKKNNVFDWEEVCLTSAYKELFNKYGINYQQGDIRALLCEQSDKAFYSSFMALMSLMLQMRNSITGRTDVDFLISPVKNSDGIFYDSRNYEAQENAILPKNADANGAYNIARKVLWAIGQFKKAEDEKLDKVKIAISNKEWLEYAQTSVKH

SEQ ID NO: 391 - protein, 1376 aa, Synthetic construct
MSKLEKFTNCYSLSKTLRFKAIPVGKTQENIDNKRLLVEDEKRAEDYKGVKKLLDRYYLSFINDVLHSIKLKNLNNYISLFRKKTRTEKENKELENLEINLRKEIAKAFKGNEGYKSLFKKDIIETILPEFLDDKDEIALVNSFNGFTTAFTGFFDNRRNMFSEEAKSTSIAFRCINENLTRYISNMDIFEKVDAIFDKHEVQEIKEKILNSDYDVEDFFEGEFFNFVLTQEGIDVYNAIIGGFVTESGEKIKGLNEYINLYNQKTKQKLPKFKPLYKQVLSDRESLSFYGEGSSGENQTTQKGQKNSRERMKRIEEGIKELGSQILKEHPVENTQLQNEKLYLYYLQNGRDMYVDQELDINRLSDYDVDHIVPQSFLKDDSIDNKVLTRSDKNRGKSDNVPSEEVVKKMKNYWRQLLNAKLITQRKFDNLTKAERGGLSGYTSDEEVLEVFRNTLNKNSEIFSSIKKLEKLFKNFDEYSSAGIFVKNGPAISTISKDIFGEWNVIRDKWNAEYDDIHLKKKAVVTEKYEDDRRKSFKKIGSFSLEQLQEYADADLSVVEKLKEIIIQKVDEIYKVYGSSEKLFDADFVLEKSLKKNDAVVAIMKDLLDSVKSFENYIKAFFGEGKETNRDESFYGDFVLAYDILLKVDHIYDAIRNYVTQKPYSKDKFKLYFQNPQFMGGWDKDKETDYRATILRYGSKYYLAIMDKKYAKCLQKIDKDDVNGNYEKINYKLLPGPNKMLPKVFFSKKWMAYYNPSEDIQKIYKNGTFKKGDMFNLNDCHKLIDFFKDSISRYPKWSNAYDFNFSETEKYKDIAGFYREVEEQGYKVSFESASKKEVDKLVEEGKLYMFQIYNKDFSDKSHGTPNLHTMYFKLLFDENNHGQIRLSGGAELFMRRASLKKEELVVHPANSPIANKNPDNPKKTTTLSYDVYKDKRFSEDQYELHIPIAINKCPKNIFKINTEVRVLLKHDDNPYVIGIDRGERNLLYIVVVDGKGNIVEQYSLNEIINNFNGIRIKTDYHSLLDKKEKERFEARQNWTSIENIKELKAGYISQVVHKICELVEKYDAVIALEDLNSGFKNSRVKVEKQVYQKFEKMLIDKLNYMVDKKSNPCATGGALKGYQITNKFESFKSMSTQNGFIFYIPAWLTSKIDPSTGFVNLLKTKYTSIADSKKFISSFDRIMYVPEEDLFEFALDYKNFSRTDADYIKKWKLYSYGNRIRIFRNPKKNNVFDWEEVCLTSAYKELFNKYGINYQQGDIRALLCEQSDKAFYSSFMALMSLMLQMRNSITGRTDVDFLISPVKNSDGIFYDSRNYEAQENAILPKNADANGAYNIARKVLWAIGQFKKAEDEKLDKVKIAISNKEWLEYAQTSVKH

SEQ ID NO: 392 - protein, 1376 aa, Synthetic construct
MSKLEKFTNCYSLSKTLRFKAIPVGKTQENIDNKRLLVEDEKRAEDYKGVKKLLDRYYLSFINDVLHSIKLKNLNNYISLFRKKTRTEKENKELENLEINLRKEIAKAFKGNEGYKSLFKKDIIETILPEFLDDKDEIALVNSFNGFTTAFTGFFDNRERMFSEEAKSTSIAFRCINENLTRYISNMDIFEKVDAIFDKHEVQEIKEKILNSDYDVEDFFEGEFFNFVLTQEGIDVYNAIIGGFVTESGEKIKGLNEYINLYNQKTKQKLPKFKPLYKQVLSDRESLSFYGEGSSGENQTTQKGQKNSRERMKRIEEGIKELGSQILKEHPVENTQLQNEKLYLYYLQNGRDMYVDQELDINRLSDYDVDHIVPQSFLKDDSIDNKVLTRSDKNRGKSDNVPSEEVVKKMKNYWRQLLNAKLITQRKFDNLTKAERGGLSGYTSDEEVLEVFRNTLNKNSEIFSSIKKLEKLFKNFDEYSSAGIFVKNGPAISTISKDIFGEWNVIRDKWNAEYDDIHLKKKAVVTEKYEDDRRKSFKKIGSFSLEQLQEYADADLSVVEKLKEIIIQKVDEIYKVYGSSEKLFDADFVLEKSLKKNDAVVAIMKDLLDSVKSFENYIKAFFGEGKETNRDESFYGDFVLAYDILLKVDHIYDAIRNYVTQKPYSKDKFKLYFQNPQFMGGWDKDKETDYRATILRYGSKYYLAIMDKKYAKCLQKIDKDDVNGNYEKINYKLLPGPNKMLPKVFFSKKWMAYYNPSEDIQKIYKNGTFKKGDMFNLNDCHKLIDFFKDSISRYPKWSNAYDFNFSETEKYKDIAGFYREVEEQGYKVSFESASKKEVDKLVEEGKLYMFQIYNKDFSDKSHGTPNLHTMYFKLLFDENNHGQIRLSGGAELFMRRASLKKEELVVHPANSPIANKNPDNPKKTTTLSYDVYKDKRFSEDQYELHIPIAINKCPKNIFKINTEVRVLLKHDDNPYVIGIDRGERNLLYIVVVDGKGNIVEQYSLNEIINNFNGIRIKTDYHSLLDKKEKERFEARQNWTSIENIKELKAGYISQVVHKICELVEKYDAVIALEDLNSGFKNSRVKVEKQVYQKFEKMLIDKLNYMVDKKSNPCATGGALKGYQITNKFESFKSMSTQNGFIFYIPAWLTSKIDPSTGFVNLLKTKYTSIADSKKFISSFDRIMYVPEEDLFEFALDYKNFSRTDADYIKKWKLYSYGNRIRIFRNPKKNNVFDWEEVCLTSAYKELFNKYGINYQQGDIRALLCEQSDKAFYSSFMALMSLMLQMRNSITGRTDVDFLISPVKNSDGIFYDSRNYEAQENAILPKNADANGAYNIARKVLWAIGQFKKAEDEKLDKVKIAISNKEWLEYAQTSVKH

SEQ ID NO: 393 - protein, 1376 aa, Synthetic construct
MSKLEKFTNCYSLSKTLRFKAIPVGKTQENIDNKRLLVEDEKRAEDYKGVKKLLDRYYLSFINDVLHSIKLKNLNNYISLFRKKTRTEKENKELENLEINLRKEIAKAFKGNEGYKSLFKKDIIETILPEFLDDKDEIALVNSFNGFTTAFTGFFDNRENMFSERAKSTSIAFRCINENLTRYISNMDIFEKVDAIFDKHEVQEIKEKILNSDYDVEDFFEGEFFNFVLTQEGIDVYNAIIGGFVTESGEKIKGLNEYINLYNQKTKQKLPKFKPLYKQVLSDRESLSFYGEGSSGENQTTQKGQKNSRERMKRIEEGIKELGSQILKEHPVENTQLQNEKLYLYYLQNGRDMYVDQELDINRLSDYDVDHIVPQSFLKDDSIDNKVLTRSDKNRGKSDNVPSEEVVKKMKNYWRQLLNAKLITQRKFDNLTKAERGGLSGYTSDEEVLEVFRNTLNKNSEIFSSIKKLEKLFKNFDEYSSAGIFVKNGPAISTISKDIFGEWNVIRDKWNAEYDDIHLKKKAVVTEKYEDDRRKSFKKIGSFSLEQLQEYADADLSVVEKLKEIIIQKVDEIYKVYGSSEKLFDADFVLEKSLKKNDAVVAIMKDLLDSVKSFENYIKAFFGEGKETNRDESFYGDFVLAYDILLKVDHIYDAIRNYVTQKPYSKDKFKLYFQNPQFMGGWDKDKETDYRATILRYGSKYYLAIMDKKYAKCLQKIDKDDVNGNYEKINYKLLPGPNKMLPKVFFSKKWMAYYNPSEDIQKIYKNGTFKKGDMFNLNDCHKLIDFFKDSISRYPKWSNAYDFNFSETEKYKDIAGFYREVEEQGYKVSFESASKKEVDKLVEEGKLYMFQIYNKDFSDKSHGTPNLHTMYFKLLFDENNHGQIRLSGGAELFMRRASLKKEELVVHPANSPIANKNPDNPKKTTTLSYDVYKDKRFSEDQYELHIPIAINKCPKNIFKINTEVRVLLKHDDNPYVIGIDRGERNLLYIVVVDGKGNIVEQYSLNEIINNFNGIRIKTDYHSLLDKKEKERFEARQNWTSIENIKELKAGYISQVVHKICELVEKYDAVIALEDLNSGFKNSRVKVEKQVYQKFEKMLIDKLNYMVDKKSNPCATGGALKGYQITNKFESFKSMSTQNGFIFYIPAWLTSKIDPSTGFVNLLKTKYTSIADSKKFISSFDRIMYVPEEDLFEFALDYKNFSRTDADYIKKWKLYSYGNRIRIFRNPKKNNVFDWEEVCLTSAYKELFNKYGINYQQGDIRALLCEQSDKAFYSSFMALMSLMLQMRNSITGRTDVDFLISPVKNSDGIFYDSRNYEAQENAILPKNADANGAYNIARKVLWAIGQFKKAEDEKLDKVKIAISNKEWLEYAQTSVKH

SEQ ID NO: 394 - protein, 1376 aa, Synthetic construct
MSKLEKFTNCYSLSKTLRFKAIPVGKTQENIDNKRLLVEDEKRAEDYKGVKKLLDRYYLSFINDVLHSIKLKNLNNYISLFRKKTRTEKENKELENLEINLRKEIAKAFKGNEGYKSLFKKDIIETILPEFLDDKDEIALVNSFNGFTTAFTGFFDNRENMFSEEARSTSIAFRCINENLTRYISNMDIFEKVDAIFDKHEVQEIKEKILNSDYDVEDFFEGEFFNFVLTQEGIDVYNAIIGGFVTESGEKIKGLNEYINLYNQKTKQKLPKFKPLYKQVLSDRESLSFYGEGSSGENQTTQKGQKNSRERMKRIEEGIKELGSQILKEHPVENTQLQNEKLYLYYLQNGRDMYVDQELDINRLSDYDVDHIVPQSFLKDDSIDNKVLTRSDKNRGKSDNVPSEEVVKKMKNYWRQLLNAKLITQRKFDNLTKAERGGLSGYTSDEEVLEVFRNTLNKNSEIFSSIKKLEKLFKNFDEYSSAGIFVKNGPAISTISKDIFGEWNVIRDKWNAEYDDIHLKKKAVVTEKYEDDRRKSFKKIGSFSLEQLQEYADADLSVVEKLKEIIIQKVDEIYKVYGSSEKLFDADFVLEKSLKKNDAVVAIMKDLLDSVKSFENYIKAFFGEGKETNRDESFYGDFVLAYDILLKVDHIYDAIRNYVTQKPYSKDKFKLYFQNPQFMGGWDKDKETDYRATILRYGSKYYLAIMDKKYAKCLQKIDKDDVNGNYEKINYKLLPGPNKMLPKVFFSKKWMAYYNPSEDIQKIYKNGTFKKGDMFNLNDCHKLIDFFKDSISRYPKWSNAYDFNFSETEKYKDIAGFYREVEEQGYKVSFESASKKEVDKLVEEGKLYMFQIYNKDFSDKSHGTPNLHTMYFKLLFDENNHGQIRLSGGAELFMRRASLKKEELVVHPANSPIANKNPDNPKKTTTLSYDVYKDKRFSEDQYELHIPIAINKCPKNIFKINTEVRVLLKHDDNPYVIGIDRGERNLLYIVVVDGKGNIVEQYSLNEIINNFNGIRIKTDYHSLLDKKEKERFEARQNWTSIENIKELKAGYISQVVHKICELVEKYDAVIALEDLNSGFKNSRVKVEKQVYQKFEKMLIDKLNYMVDKKSNPCATGGALKGYQITNKFESFKSMSTQNGFIFYIPAWLTSKIDPSTGFVNLLKTKYTSIADSKKFISSFDRIMYVPEEDLFEFALDYKNFSRTDADYIKKWKLYSYGNRIRIFRNPKKNNVFDWEEVCLTSAYKELFNKYGINYQQGDIRALLCEQSDKAFYSSFMALMSLMLQMRNSITGRTDVDFLISPVKNSDGIFYDSRNYEAQENAILPKNADANGAYNIARKVLWAIGQFKKAEDEKLDKVKIAISNKEWLEYAQTSVKH

SEQ ID NO: 395 - protein, 1376 aa, Synthetic construct
MSKLEKFTNCYSLSKTLRFKAIPVGKTQENIDNKRLLVEDEKRAEDYKGVKKLLDRYYLSFINDVLHSIKLKNLNNYISLFRKKTRTEKENKELENLEINLRKEIAKAFKGNEGYKSLFKKDIIETILPEFLDDKDEIALVNSFNGFTTAFTGFFDNRENMFSEEAKRTSIAFRCINENLTRYISNMDIFEKVDAIFDKHEVQEIKEKILNSDYDVEDFFEGEFFNFVLTQEGIDVYNAIIGGFVTESGEKIKGLNEYINLYNQKTKQKLPKFKPLYKQVLSDRESLSFYGEGSSGENQTTQKGQKNSRERMKRIEEGIKELGSQILKEHPVENTQLQNEKLYLYYLQNGRDMYVDQELDINRLSDYDVDHIVPQSFLKDDSIDNKVLTRSDKNRGKSDNVPSEEVVKKMKNYWRQLLNAKLITQRKFDNLTKAERGGLSGYTSDEEVLEVFRNTLNKNSEIFSSIKKLEKLFKNFDEYSSAGIFVKNGPAISTISKDIFGEWNVIRDKWNAEYDDIHLKKKAVVTEKYEDDRRKSFKKIGSFSLEQLQEYADADLSVVEKLKEIIIQKVDEIYKVYGSSEKLFDADFVLEKSLKKNDAVVAIMKDLLDSVKSFENYIKAFFGEGKETNRDESFYGDFVLAYDILLKVDHIYDAIRNYVTQKPYSKDKFKLYFQNPQFMGGWDKDKETDYRATILRYGSKYYLAIMDKKYAKCLQKIDKDDVNGNYEKINYKLLPGPNKMLPKVFFSKKWMAYYNPSEDIQKIYKNGTFKKGDMFNLNDCHKLIDFFKDSISRYPKWSNAYDFNFSETEKYKDIAGFYREVEEQGYKVSFESASKKEVDKLVEEGKLYMFQIYNKDFSDKSHGTPNLHTMYFKLLFDENNHGQIRLSGGAELFMRRASLKKEELVVHPANSPIANKNPDNPKKTTTLSYDVYKDKRFSEDQYELHIPIAINKCPKNIFKINTEVRVLLKHDDNPYVIGIDRGERNLLYIVVVDGKGNIVEQYSLNEIINNFNGIRIKTDYHSLLDKKEKERFEARQNWTSIENIKELKAGYISQVVHKICELVEKYDAVIALEDLNSGFKNSRVKVEKQVYQKFEKMLIDKLNYMVDKKSNPCATGGALKGYQITNKFESFKSMSTQNGFIFYIPAWLTSKIDPSTGFVNLLKTKYTSIADSKKFISSFDRIMYVPEEDLFEFALDYKNFSRTDADYIKKWKLYSYGNRIRIFRNPKKNNVFDWEEVCLTSAYKELFNKYGINYQQGDIRALLCEQSDKAFYSSFMALMSLMLQMRNSITGRTDVDFLISPVKNSDGIFYDSRNYEAQENAILPKNADANGAYNIARKVLWAIGQFKKAEDEKLDKVKIAISNKEWLEYAQTSVKH

SEQ ID NO: 396 - protein, 1376 aa, Synthetic construct
MSKLEKFTNCYSLSKTLRFKAIPVGKTQENIDNKRLLVEDEKRAEDYKGVKKLLDRYYLSFINDVLHSIKLKNLNNYISLFRKKTRTEKENKELENLEINLRKEIAKAFKGNEGYKSLFKKDIIETILPEFLDDKDEIALVNSFNGFTTAFTGFFDNRENMFSEEAKSRSIAFRCINENLTRYISNMDIFEKVDAIFDKHEVQEIKEKILNSDYDVEDFFEGEFFNFVLTQEGIDVYNAIIGGFVTESGEKIKGLNEYINLYNQKTKQKLPKFKPLYKQVLSDRESLSFYGEGSSGENQTTQKGQKNSRERMKRIEEGIKELGSQILKEHPVENTQLQNEKLYLYYLQNGRDMYVDQELDINRLSDYDVDHIVPQSFLKDDSIDNKVLTRSDKNRGKSDNVPSEEVVKKMKNYWRQLLNAKLITQRKFDNLTKAERGGLSGYTSDEEVLEVFRNTLNKNSEIFSSIKKLEKLFKNFDEYSSAGIFVKNGPAISTISKDIFGEWNVIRDKWNAEYDDIHLKKKAVVTEKYEDDRRKSFKKIGSFSLEQLQEYADADLSVVEKLKEIIIQKVDEIYKVYGSSEKLFDADFVLEKSLKKNDAVVAIMKDLLDSVKSFENYIKAFFGEGKETNRDESFYGDFVLAYDILLKVDHIYDAIRNYVTQKPYSKDKFKLYFQNPQFMGGWDKDKETDYRATILRYGSKYYLAIMDKKYAKCLQKIDKDDVNGNYEKINYKLLPGPNKMLPKVFFSKKWMAYYNPSEDIQKIYKNGTFKKGDMFNLNDCHKLIDFFKDSISRYPKWSNAYDFNFSETEKYKDIAGFYREVEEQGYKVSFESASKKEVDKLVEEGKLYMFQIYNKDFSDKSHGTPNLHTMYFKLLFDENNHGQIRLSGGAELFMRRASLKKEELVVHPANSPIANKNPDNPKKTTTLSYDVYKDKRFSEDQYELHIPIAINKCPKNIFKINTEVRVLLKHDDNPYVIGIDRGERNLLYIVVVDGKGNIVEQYSLNEIINNFNGIRIKTDYHSLLDKKEKERFEARQNWTSIENIKELKAGYISQVVHKICELVEKYDAVIALEDLNSGFKNSRVKVEKQVYQKFEKMLIDKLNYMVDKKSNPCATGGALKGYQITNKFESFKSMSTQNGFIFYIPAWLTSKIDPSTGFVNLLKTKYTSIADSKKFISSFDRIMYVPEEDLFEFALDYKNFSRTDADYIKKWKLYSYGNRIRIFRNPKKNNVFDWEEVCLTSAYKELFNKYGINYQQGDIRALLCEQSDKAFYSSFMALMSLMLQMRNSITGRTDVDFLISPVKNSDGIFYDSRNYEAQENAILPKNADANGAYNIARKVLWAIGQFKKAEDEKLDKVKIAISNKEWLEYAQTSVKH

SEQ ID NO: 397 - protein, 1376 aa, Synthetic construct
MSKLEKFTNCYSLSKTLRFKAIPVGKTQENIDNKRLLVEDEKRAEDYKGVKKLLDRYYLSFINDVLHSIKLKNLNNYISLFRKKTRTEKENKELENLEINLRKEIAKAFKGNEGYKSLFKKDIIETILPEFLDDKDEIALVNSFNGFTTAFTGFFDNRENMFSEEAKSTSIAFRCINENLTRYISNMDIFEKVDAIFDKHEVQEIKEKILNSDYDVEDFFEGEFFNFVLTQEGIDVYNAIIGGFVTESGERIKGLNEYINLYNQKTKQKLPKFKPLYKQVLSDRESLSFYGEGSSGENQTTQKGQKNSRERMKRIEEGIKELGSQILKEHPVENTQLQNEKLYLYYLQNGRDMYVDQELDINRLSDYDVDHIVPQSFLKDDSIDNKVLTRSDKNRGKSDNVPSEEVVKKMKNYWRQLLNAKLITQRKFDNLTKAERGGLSGYTSDEEVLEVFRNTLNKNSEIFSSIKKLEKLFKNFDEYSSAGIFVKNGPAISTISKDIFGEWNVIRDKWNAEYDDIHLKKKAVVTEKYEDDRRKSFKKIGSFSLEQLQEYADADLSVVEKLKEIIIQKVDEIYKVYGSSEKLFDADFVLEKSLKKNDAVVAIMKDLLDSVKSFENYIKAFFGEGKETNRDESFYGDFVLAYDILLKVDHIYDAIRNYVTQKPYSKDKFKLYFQNPQFMGGWDKDKETDYRATILRYGSKYYLAIMDKKYAKCLQKIDKDDVNGNYEKINYKLLPGPNKMLPKVFFSKKWMAYYNPSEDIQKIYKNGTFKKGDMFNLNDCHKLIDFFKDSISRYPKWSNAYDFNFSETEKYKDIAGFYREVEEQGYKVSFESASKKEVDKLVEEGKLYMFQIYNKDFSDKSHGTPNLHTMYFKLLFDENNHGQIRLSGGAELFMRRASLKKEELVVHPANSPIANKNPDNPKKTTTLSYDVYKDKRFSEDQYELHIPIAINKCPKNIFKINTEVRVLLKHDDNPYVIGIDRGERNLLYIVVVDGKGNIVEQYSLNEIINNFNGIRIKTDYHSLLDKKEKERFEARQNWTSIENIKELKAGYISQVVHKICELVEKYDAVIALEDLNSGFKNSRVKVEKQVYQKFEKMLIDKLNYMVDKKSNPCATGGALKGYQITNKFESFKSMSTQNGFIFYIPAWLTSKIDPSTGFVNLLKTKYTSIADSKKFISSFDRIMYVPEEDLFEFALDYKNFSRTDADYIKKWKLYSYGNRIRIFRNPKKNNVFDWEEVCLTSAYKELFNKYGINYQQGDIRALLCEQSDKAFYSSFMALMSLMLQMRNSITGRTDVDFLISPVKNSDGIFYDSRNYEAQENAILPKNADANGAYNIARKVLWAIGQFKKAEDEKLDKVKIAISNKEWLEYAQTSVKH

SEQ ID NO: 398 - protein, 1376 aa, Synthetic construct
MSKLEKFTNCYSLSKTLRFKAIPVGKTQENIDNKRLLVEDEKRAEDYKGVKKLLDRYYLSFINDVLHSIKLKNLNNYISLFRKKTRTEKENKELENLEINLRKEIAKAFKGNEGYKSLFKKDIIETILPEFLDDKDEIALVNSFNGFTTAFTGFFDNRENMFSEEAKSTSIAFRCINENLTRYISNMDIFEKVDAIFDKHEVQEIKEKILNSDYDVEDFFEGEFFNFVLTQEGIDVYNAIIGGFVTESGEKIKGLNRYINLYNQKTKQKLPKFKPLYKQVLSDRESLSFYGEGSSGENQTTQKGQKNSRERMKRIEEGIKELGSQILKEHPVENTQLQNEKLYLYYLQNGRDMYVDQELDINRLSDYDVDHIVPQSFLKDDSIDNKVLTRSDKNRGKSDNVPSEEVVKKMKNYWRQLLNAKLITQRKFDNLTKAERGGLSGYTSDEEVLEVFRNTLNKNSEIFSSIKKLEKLFKNFDEYSSAGIFVKNGPAISTISKDIFGEWNVIRDKWNAEYDDIHLKKKAVVTEKYEDDRRKSFKKIGSFSLEQLQEYADADLSVVEKLKEIIIQKVDEIYKVYGSSEKLFDADFVLEKSLKKNDAVVAIMKDLLDSVKSFENYIKAFFGEGKETNRDESFYGDFVLAYDILLKVDHIYDAIRNYVTQKPYSKDKFKLYFQNPQFMGGWDKDKETDYRATILRYGSKYYLAIMDKKYAKCLQKIDKDDVNGNYEKINYKLLPGPNKMLPKVFFSKKWMAYYNPSEDIQKIYKNGTFKKGDMFNLNDCHKLIDFFKDSISRYPKWSNAYDFNFSETEKYKDIAGFYREVEEQGYKVSFESASKKEVDKLVEEGKLYMFQIYNKDFSDKSHGTPNLHTMYFKLLFDENNHGQIRLSGGAELFMRRASLKKEELVVHPANSPIANKNPDNPKKTTTLSYDVYKDKRFSEDQYELHIPIAINKCPKNIFKINTEVRVLLKHDDNPYVIGIDRGERNLLYIVVVDGKGNIVEQYSLNEIINNFNGIRIKTDYHSLLDKKEKERFEARQNWTSIENIKELKAGYISQVVHKICELVEKYDAVIALEDLNSGFKNSRVKVEKQVYQKFEKMLIDKLNYMVDKKSNPCATGGALKGYQITNKFESFKSMSTQNGFIFYIPAWLTSKIDPSTGFVNLLKTKYTSIADSKKFISSFDRIMYVPEEDLFEFALDYKNFSRTDADYIKKWKLYSYGNRIRIFRNPKKNNVFDWEEVCLTSAYKELFNKYGINYQQGDIRALLCEQSDKAFYSSFMALMSLMLQMRNSITGRTDVDFLISPVKNSDGIFYDSRNYEAQENAILPKNADANGAYNIARKVLWAIGQFKKAEDEKLDKVKIAISNKEWLEYAQTSVKH

SEQ ID NO: 399 - protein, 1376 aa, Synthetic construct
MSKLEKFTNCYSLSKTLRFKAIPVGKTQENIDNKRLLVEDEKRAEDYKGVKKLLDRYYLSFINDVLHSIKLKNLNNYISLFRKKTRTEKENKELENLEINLRKEIAKAFKGNEGYKSLFKKDIIETILPEFLDDKDEIALVNSFNGFTTAFTGFFDNRENMFSEEAKSTSIAFRCINENLTRYISNMDIFEKVDAIFDKHEVQEIKEKILNSDYDVEDFFEGEFFNFVLTQEGIDVYNAIIGGFVTESGEKIKGLNEYIRLYNQKTKQKLPKFKPLYKQVLSDRESLSFYGEGSSGENQTTQKGQKNSRERMKRIEEGIKELGSQILKEHPVENTQLQNEKLYLYYLQNGRDMYVDQELDINRLSDYDVDHIVPQSFLKDDSIDNKVLTRSDKNRGKSDNVPSEEVVKKMKNYWRQLLNAKLITQRKFDNLTKAERGGLSGYTSDEEVLEVFRNTLNKNSEIFSSIKKLEKLFKNFDEYSSAGIFVKNGPAISTISKDIFGEWNVIRDKWNAEYDDIHLKKKAVVTEKYEDDRRKSFKKIGSFSLEQLQEYADADLSVVEKLKEIIIQKVDEIYKVYGSSEKLFDADFVLEKSLKKNDAVVAIMKDLLDSVKSFENYIKAFFGEGKETNRDESFYGDFVLAYDILLKVDHIYDAIRNYVTQKPYSKDKFKLYFQNPQFMGGWDKDKETDYRATILRYGSKYYLAIMDKKYAKCLQKIDKDDVNGNYEKINYKLLPGPNKMLPKVFFSKKWMAYYNPSEDIQKIYKNGTFKKGDMFNLNDCHKLIDFFKDSISRYPKWSNAYDFNFSETEKYKDIAGFYREVEEQGYKVSFESASKKEVDKLVEEGKLYMFQIYNKDFSDKSHGTPNLHTMYFKLLFDENNHGQIRLSGGAELFMRRASLKKEELVVHPANSPIANKNPDNPKKTTTLSYDVYKDKRFSEDQYELHIPIAINKCPKNIFKINTEVRVLLKHDDNPYVIGIDRGERNLLYIVVVDGKGNIVEQYSLNEIINNFNGIRIKTDYHSLLDKKEKERFEARQNWTSIENIKELKAGYISQVVHKICELVEKYDAVIALEDLNSGFKNSRVKVEKQVYQKFEKMLIDKLNYMVDKKSNPCATGGALKGYQITNKFESFKSMSTQNGFIFYIPAWLTSKIDPSTGFVNLLKTKYTSIADSKKFISSFDRIMYVPEEDLFEFALDYKNFSRTDADYIKKWKLYSYGNRIRIFRNPKKNNVFDWEEVCLTSAYKELFNKYGINYQQGDIRALLCEQSDKAFYSSFMALMSLMLQMRNSITGRTDVDFLISPVKNSDGIFYDSRNYEAQENAILPKNADANGAYNIARKVLWAIGQFKKAEDEKLDKVKIAISNKEWLEYAQTSVKH

SEQ ID NO: 400 - protein, 1376 aa, Synthetic construct
MSKLEKFTNCYSLSKTLRFKAIPVGKTQENIDNKRLLVEDEKRAEDYKGVKKLLDRYYLSFINDVLHSIKLKNLNNYISLFRKKTRTEKENKELENLEINLRKEIAKAFKGNEGYKSLFKKDIIETILPEFLDDKDEIALVNSFNGFTTAFTGFFDNRENMFSEEAKSTSIAFRCINENLTRYISNMDIFEKVDAIFDKHEVQEIKEKILNSDYDVEDFFEGEFFNFVLTQEGIDVYNAIIGGFVTESGEKIKGLNEYINLYNRKTKQKLPKFKPLYKQVLSDRESLSFYGEGSSGENQTTQKGQKNSRERMKRIEEGIKELGSQILKEHPVENTQLQNEKLYLYYLQNGRDMYVDQELDINRLSDYDVDHIVPQSFLKDDSIDNKVLTRSDKNRGKSDNVPSEEVVKKMKNYWRQLLNAKLITQRKFDNLTKAERGGLSGYTSDEEVLEVFRNTLNKNSEIFSSIKKLEKLFKNFDEYSSAGIFVKNGPAISTISKDIFGEWNVIRDKWNAEYDDIHLKKKAVVTEKYEDDRRKSFKKIGSFSLEQLQEYADADLSVVEKLKEIIIQKVDEIYKVYGSSEKLFDADFVLEKSLKKNDAVVAIMKDLLDSVKSFENYIKAFFGEGKETNRDESFYGDFVLAYDILLKVDHIYDAIRNYVTQKPYSKDKFKLYFQNPQFMGGWDKDKETDYRATILRYGSKYYLAIMDKKYAKCLQKIDKDDVNGNYEKINYKLLPGPNKMLPKVFFSKKWMAYYNPSEDIQKIYKNGTFKKGDMFNLNDCHKLIDFFKDSISRYPKWSNAYDFNFSETEKYKDIAGFYREVEEQGYKVSFESASKKEVDKLVEEGKLYMFQIYNKDFSDKSHGTPNLHTMYFKLLFDENNHGQIRLSGGAELFMRRASLKKEELVVHPANSPIANKNPDNPKKTTTLSYDVYKDKRFSEDQYELHIPIAINKCPKNIFKINTEVRVLLKHDDNPYVIGIDRGERNLLYIVVVDGKGNIVEQYSLNEIINNFNGIRIKTDYHSLLDKKEKERFEARQNWTSIENIKELKAGYISQVVHKICELVEKYDAVIALEDLNSGFKNSRVKVEKQVYQKFEKMLIDKLNYMVDKKSNPCATGGALKGYQITNKFESFKSMSTQNGFIFYIPAWLTSKIDPSTGFVNLLKTKYTSIADSKKFISSFDRIMYVPEEDLFEFALDYKNFSRTDADYIKKWKLYSYGNRIRIFRNPKKNNVFDWEEVCLTSAYKELFNKYGINYQQGDIRALLCEQSDKAFYSSFMALMSLMLQMRNSITGRTDVDFLISPVKNSDGIFYDSRNYEAQENAILPKNADANGAYNIARKVLWAIGQFKKAEDEKLDKVKIAISNKEWLEYAQTSVKH

SEQ ID NO: 401 - protein, 1376 aa, Synthetic construct
MSKLEKFTNCYSLSKTLRFKAIPVGKTQENIDNKRLLVEDEKRAEDYKGVKKLLDRYYLSFINDVLHSIKLKNLNNYISLFRKKTRTEKENKELENLEINLRKEIAKAFKGNEGYKSLFKKDIIETILPEFLDDKDEIALVNSFNGFTTAFTGFFDNRENMFSEEAKSTSIAFRCINENLTRYISNMDIFEKVDAIFDKHEVQEIKEKILNSDYDVEDFFEGEFFNFVLTQEGIDVYNAIIGGFVTESGEKIKGLNEYINLYNQKTKQKLPRFKPLYKQVLSDRESLSFYGEGSSGENQTTQKGQKNSRERMKRIEEGIKELGSQILKEHPVENTQLQNEKLYLYYLQNGRDMYVDQELDINRLSDYDVDHIVPQSFLKDDSIDNKVLTRSDKNRGKSDNVPSEEVVKKMKNYWRQLLNAKLITQRKFDNLTKAERGGLSGYTSDEEVLEVFRNTLNKNSEIFSSIKKLEKLFKNFDEYSSAGIFVKNGPAISTISKDIFGEWNVIRDKWNAEYDDIHLKKKAVVTEKYEDDRRKSFKKIGSFSLEQLQEYADADLSVVEKLKEIIIQKVDEIYKVYGSSEKLFDADFVLEKSLKKNDAVVAIMKDLLDSVKSFENYIKAFFGEGKETNRDESFYGDFVLAYDILLKVDHIYDAIRNYVTQKPYSKDKFKLYFQNPQFMGGWDKDKETDYRATILRYGSKYYLAIMDKKYAKCLQKIDKDDVNGNYEKINYKLLPGPNKMLPKVFFSKKWMAYYNPSEDIQKIYKNGTFKKGDMFNLNDCHKLIDFFKDSISRYPKWSNAYDFNFSETEKYKDIAGFYREVEEQGYKVSFESASKKEVDKLVEEGKLYMFQIYNKDFSDKSHGTPNLHTMYFKLLFDENNHGQIRLSGGAELFMRRASLKKEELVVHPANSPIANKNPDNPKKTTTLSYDVYKDKRFSEDQYELHIPIAINKCPKNIFKINTEVRVLLKHDDNPYVIGIDRGERNLLYIVVVDGKGNIVEQYSLNEIINNFNGIRIKTDYHSLLDKKEKERFEARQNWTSIENIKELKAGYISQVVHKICELVEKYDAVIALEDLNSGFKNSRVKVEKQVYQKFEKMLIDKLNYMVDKKSNPCATGGALKGYQITNKFESFKSMSTQNGFIFYIPAWLTSKIDPSTGFVNLLKTKYTSIADSKKFISSFDRIMYVPEEDLFEFALDYKNFSRTDADYIKKWKLYSYGNRIRIFRNPKKNNVFDWEEVCLTSAYKELFNKYGINYQQGDIRALLCEQSDKAFYSSFMALMSLMLQMRNSITGRTDVDFLISPVKNSDGIFYDSRNYEAQENAILPKNADANGAYNIARKVLWAIGQFKKAEDEKLDKVKIAISNKEWLEYAQTSVKH

SEQ ID NO: 402 - protein, 1376 aa, Synthetic construct
MSKLEKFTNCYSLSKTLRFKAIPVGKTQENIDNKRLLVEDEKRAEDYKGVKKLLDRYYLSFINDVLHSIKLKNLNNYISLFRKKTRTEKENKELENLEINLRKEIAKAFKGNEGYKSLFKKDIIETILPEFLDDKDEIALVNSFNGFTTAFTGFFDNRENMFSEEAKSTSIAFRCINENLTRYISNMDIFEKVDAIFDKHEVQEIKEKILNSDYDVEDFFEGEFFNFVLTQEGIDVYNAIIGGFVTESGEKIKGLNEYINLYNQKTKQKLPKFKPLYKQVLSDRESLSFYGEGSSGENQTTQKGQKNSRERMKRIEEGIKELGSQILKEHPVENTQLQNEKLYLYYLQNGRDMYVDQELDINRLSDYDVDHIVPQSFLKDDSIDNKVLTRSDKNRGKSDNVPSEEVVKKMKNYWRQLLNAKLITQRKFDNLTKAERGGLSGYTSDEEVLEVFRNTLNKNSEIFSSIKKLEKLFKNFDEYSSAGIFVKNGPAISTISRDIFGEWNVIRDKWNAEYDDIHLKKKAVVTEKYEDDRRKSFKKIGSFSLEQLQEYADADLSVVEKLKEIIIQKVDEIYKVYGSSEKLFDADFVLEKSLKKNDAVVAIMKDLLDSVKSFENYIKAFFGEGKETNRDESFYGDFVLAYDILLKVDHIYDAIRNYVTQKPYSKDKFKLYFQNPQFMGGWDKDKETDYRATILRYGSKYYLAIMDKKYAKCLQKIDKDDVNGNYEKINYKLLPGPNKMLPKVFFSKKWMAYYNPSEDIQKIYKNGTFKKGDMFNLNDCHKLIDFFKDSISRYPKWSNAYDFNFSETEKYKDIAGFYREVEEQGYKVSFESASKKEVDKLVEEGKLYMFQIYNKDFSDKSHGTPNLHTMYFKLLFDENNHGQIRLSGGAELFMRRASLKKEELVVHPANSPIANKNPDNPKKTTTLSYDVYKDKRFSEDQYELHIPIAINKCPKNIFKINTEVRVLLKHDDNPYVIGIDRGERNLLYIVVVDGKGNIVEQYSLNEIINNFNGIRIKTDYHSLLDKKEKERFEARQNWTSIENIKELKAGYISQVVHKICELVEKYDAVIALEDLNSGFKNSRVKVEKQVYQKFEKMLIDKLNYMVDKKSNPCATGGALKGYQITNKFESFKSMSTQNGFIFYIPAWLTSKIDPSTGFVNLLKTKYTSIADSKKFISSFDRIMYVPEEDLFEFALDYKNFSRTDADYIKKWKLYSYGNRIRIFRNPKKNNVFDWEEVCLTSAYKELFNKYGINYQQGDIRALLCEQSDKAFYSSFMALMSLMLQMRNSITGRTDVDFLISPVKNSDGIFYDSRNYEAQENAILPKNADANGAYNIARKVLWAIGQFKKAEDEKLDKVKIAISNKEWLEYAQTSVKH

SEQ ID NO: 403 - protein, 1376 aa, Synthetic construct
MSKLEKFTNCYSLSKTLRFKAIPVGKTQENIDNKRLLVEDEKRAEDYKGVKKLLDRYYLSFINDVLHSIKLKNLNNYISLFRKKTRTEKENKELENLEINLRKEIAKAFKGNEGYKSLFKKDIIETILPEFLDDKDEIALVNSFNGFTTAFTGFFDNRENMFSEEAKSTSIAFRCINENLTRYISNMDIFEKVDAIFDKHEVQEIKEKILNSDYDVEDFFEGEFFNFVLTQEGIDVYNAIIGGFVTESGEKIKGLNEYINLYNQKTKQKLPKFKPLYKQVLSDRESLSFYGEGSSGENQTTQKGQKNSRERMKRIEEGIKELGSQILKEHPVENTQLQNEKLYLYYLQNGRDMYVDQELDINRLSDYDVDHIVPQSFLKDDSIDNKVLTRSDKNRGKSDNVPSEEVVKKMKNYWRQLLNAKLITQRKFDNLTKAERGGLSGYTSDEEVLEVFRNTLNKNSEIFSSIKKLEKLFKNFDEYSSAGIFVKNGPAISTISKDIFGEWNVIRDKWNAEYDDIHLKKKAVVTEKYEDDRRKSFKKIGSFSLEQLQEYADADLSVVEKLKEIIIQKVDEIYKVYGSSEKLFDADFVLEKSLKKNDAVVAIMKDLLDSVKSFENYIKAFFGEGKETNRDESFYGDFVLAYDILLKVDHIYRAIRNYVTQKPYSKDKFKLYFQNPQFMGGWDKDKETDYRATILRYGSKYYLAIMDKKYAKCLQKIDKDDVNGNYEKINYKLLPGPNKMLPKVFFSKKWMAYYNPSEDIQKIYKNGTFKKGDMFNLNDCHKLIDFFKDSISRYPKWSNAYDFNFSETEKYKDIAGFYREVEEQGYKVSFESASKKEVDKLVEEGKLYMFQIYNKDFSDKSHGTPNLHTMYFKLLFDENNHGQIRLSGGAELFMRRASLKKEELVVHPANSPIANKNPDNPKKTTTLSYDVYKDKRFSEDQYELHIPIAINKCPKNIFKINTEVRVLLKHDDNPYVIGIDRGERNLLYIVVVDGKGNIVEQYSLNEIINNFNGIRIKTDYHSLLDKKEKERFEARQNWTSIENIKELKAGYISQVVHKICELVEKYDAVIALEDLNSGFKNSRVKVEKQVYQKFEKMLIDKLNYMVDKKSNPCATGGALKGYQITNKFESFKSMSTQNGFIFYIPAWLTSKIDPSTGFVNLLKTKYTSIADSKKFISSFDRIMYVPEEDLFEFALDYKNFSRTDADYIKKWKLYSYGNRIRIFRNPKKNNVFDWEEVCLTSAYKELFNKYGINYQQGDIRALLCEQSDKAFYSSFMALMSLMLQMRNSITGRTDVDFLISPVKNSDGIFYDSRNYEAQENAILPKNADANGAYNIARKVLWAIGQFKKAEDEKLDKVKIAISNKEWLEYAQTSVKH

SEQ ID NO: 404 - protein, 1376 aa, Synthetic construct
MSKLEKFTNCYSLSKTLRFKAIPVGKTQENIDNKRLLVEDEKRAEDYKGVKKLLDRYYLSFINDVLHSIKLKNLNNYISLFRKKTRTEKENKELENLEINLRKEIAKAFKGNEGYKSLFKKDIIETILPEFLDDKDEIALVNSFNGFTTAFTGFFDNRENMFSEEAKSTSIAFRCINENLTRYISNMDIFEKVDAIFDKHEVQEIKEKILNSDYDVEDFFEGEFFNFVLTQEGIDVYNAIIGGFVTESGEKIKGLNEYINLYNQKTKQKLPKFKPLYKQVLSDRESLSFYGEGSSGENQTTQKGQKNSRERMKRIEEGIKELGSQILKEHPVENTQLQNEKLYLYYLQNGRDMYVDQELDINRLSDYDVDHIVPQSFLKDDSIDNKVLTRSDKNRGKSDNVPSEEVVKKMKNYWRQLLNAKLITQRKFDNLTKAERGGLSGYTSDEEVLEVFRNTLNKNSEIFSSIKKLEKLFKNFDEYSSAGIFVKNGPAISTISKDIFGEWNVIRDKWNAEYDDIHLKKKAVVTEKYEDDRRKSFKKIGSFSLEQLQEYADADLSVVEKLKEIIIQKVDEIYKVYGSSEKLFDADFVLEKSLKKNDAVVAIMKDLLDSVKSFENYIKAFFGEGKETNRDESFYGDFVLAYDILLKVDHIYDAIRRYVTQKPYSKDKFKLYFQNPQFMGGWDKDKETDYRATILRYGSKYYLAIMDKKYAKCLQKIDKDDVNGNYEKINYKLLPGPNKMLPKVFFSKKWMAYYNPSEDIQKIYKNGTFKKGDMFNLNDCHKLIDFFKDSISRYPKWSNAYDFNFSETEKYKDIAGFYREVEEQGYKVSFESASKKEVDKLVEEGKLYMFQIYNKDFSDKSHGTPNLHTMYFKLLFDENNHGQIRLSGGAELFMRRASLKKEELVVHPANSPIANKNPDNPKKTTTLSYDVYKDKRFSEDQYELHIPIAINKCPKNIFKINTEVRVLLKHDDNPYVIGIDRGERNLLYIVVVDGKGNIVEQYSLNEIINNFNGIRIKTDYHSLLDKKEKERFEARQNWTSIENIKELKAGYISQVVHKICELVEKYDAVIALEDLNSGFKNSRVKVEKQVYQKFEKMLIDKLNYMVDKKSNPCATGGALKGYQITNKFESFKSMSTQNGFIFYIPAWLTSKIDPSTGFVNLLKTKYTSIADSKKFISSFDRIMYVPEEDLFEFALDYKNFSRTDADYIKKWKLYSYGNRIRIFRNPKKNNVFDWEEVCLTSAYKELFNKYGINYQQGDIRALLCEQSDKAFYSSFMALMSLMLQMRNSITGRTDVDFLISPVKNSDGIFYDSRNYEAQENAILPKNADANGAYNIARKVLWAIGQFKKAEDEKLDKVKIAISNKEWLEYAQTSVKH

SEQ ID NO: 405 - protein, 1376 aa, Synthetic construct
MSKLEKFTNCYSLSKTLRFKAIPVGKTQENIDNKRLLVEDEKRAEDYKGVKKLLDRYYLSFINDVLHSIKLKNLNNYISLFRKKTRTEKENKELENLEINLRKEIAKAFKGNEGYKSLFKKDIIETILPEFLDDKDEIALVNSFNGFTTAFTGFFDNRENMFSEEAKSTSIAFRCINENLTRYISNMDIFEKVDAIFDKHEVQEIKEKILNSDYDVEDFFEGEFFNFVLTQEGIDVYNAIIGGFVTESGEKIKGLNEYINLYNQKTKQKLPKFKPLYKQVLSDRESLSFYGEGSSGENQTTQKGQKNSRERMKRIEEGIKELGSQILKEHPVENTQLQNEKLYLYYLQNGRDMYVDQELDINRLSDYDVDHIVPQSFLKDDSIDNKVLTRSDKNRGKSDNVPSEEVVKKMKNYWRQLLNAKLITQRKFDNLTKAERGGLSGYTSDEEVLEVFRNTLNKNSEIFSSIKKLEKLFKNFDEYSSAGIFVKNGPAISTISKDIFGEWNVIRDKWNAEYDDIHLKKKAVVTEKYEDDRRKSFKKIGSFSLEQLQEYADADLSVVEKLKEIIIQKVDEIYKVYGSSEKLFDADFVLEKSLKKNDAVVAIMKDLLDSVKSFENYIKAFFGEGKETNRDESFYGDFVLAYDILLKVDHIYDAIRNYVRQKPYSKDKFKLYFQNPQFMGGWDKDKETDYRATILRYGSKYYLAIMDKKYAKCLQKIDKDDVNGNYEKINYKLLPGPNKMLPKVFFSKKWMAYYNPSEDIQKIYKNGTFKKGDMFNLNDCHKLIDFFKDSISRYPKWSNAYDFNFSETEKYKDIAGFYREVEEQGYKVSFESASKKEVDKLVEEGKLYMFQIYNKDFSDKSHGTPNLHTMYFKLLFDENNHGQIRLSGGAELFMRRASLKKEELVVHPANSPIANKNPDNPKKTTTLSYDVYKDKRFSEDQYELHIPIAINKCPKNIFKINTEVRVLLKHDDNPYVIGIDRGERNLLYIVVVDGKGNIVEQYSLNEIINNFNGIRIKTDYHSLLDKKEKERFEARQNWTSIENIKELKAGYISQVVHKICELVEKYDAVIALEDLNSGFKNSRVKVEKQVYQKFEKMLIDKLNYMVDKKSNPCATGGALKGYQITNKFESFKSMSTQNGFIFYIPAWLTSKIDPSTGFVNLLKTKYTSIADSKKFISSFDRIMYVPEEDLFEFALDYKNFSRTDADYIKKWKLYSYGNRIRIFRNPKKNNVFDWEEVCLTSAYKELFNKYGINYQQGDIRALLCEQSDKAFYSSFMALMSLMLQMRNSITGRTDVDFLISPVKNSDGIFYDSRNYEAQENAILPKNADANGAYNIARKVLWAIGQFKKAEDEKLDKVKIAISNKEWLEYAQTSVKH

SEQ ID NO: 406 - protein, 1376 aa, Synthetic construct
MSKLEKFTNCYSLSKTLRFKAIPVGKTQENIDNKRLLVEDEKRAEDYKGVKKLLDRYYLSFINDVLHSIKLKNLNNYISLFRKKTRTEKENKELENLEINLRKEIAKAFKGNEGYKSLFKKDIIETILPEFLDDKDEIALVNSFNGFTTAFTGFFDNRENMFSEEAKSTSIAFRCINENLTRYISNMDIFEKVDAIFDKHEVQEIKEKILNSDYDVEDFFEGEFFNFVLTQEGIDVYNAIIGGFVTESGEKIKGLNEYINLYNQKTKQKLPKFKPLYKQVLSDRESLSFYGEGSSGENQTTQKGQKNSRERMKRIEEGIKELGSQILKEHPVENTQLQNEKLYLYYLQNGRDMYVDQELDINRLSDYDVDHIVPQSFLKDDSIDNKVLTRSDKNRGKSDNVPSEEVVKKMKNYWRQLLNAKLITQRKFDNLTKAERGGLSGYTSDEEVLEVFRNTLNKNSEIFSSIKKLEKLFKNFDEYSSAGIFVKNGPAISTISKDIFGEWNVIRDKWNAEYDDIHLKKKAVVTEKYEDDRRKSFKKIGSFSLEQLQEYADADLSVVEKLKEIIIQKVDEIYKVYGSSEKLFDADFVLEKSLKKNDAVVAIMKDLLDSVKSFENYIKAFFGEGKETNRDESFYGDFVLAYDILLKVDHIYDAIRNYVTQRPYSKDKFKLYFQNPQFMGGWDKDKETDYRATILRYGSKYYLAIMDKKYAKCLQKIDKDDVNGNYEKINYKLLPGPNKMLPKVFFSKKWMAYYNPSEDIQKIYKNGTFKKGDMFNLNDCHKLIDFFKDSISRYPKWSNAYDFNFSETEKYKDIAGFYREVEEQGYKVSFESASKKEVDKLVEEGKLYMFQIYNKDFSDKSHGTPNLHTMYFKLLFDENNHGQIRLSGGAELFMRRASLKKEELVVHPANSPIANKNPDNPKKTTTLSYDVYKDKRFSEDQYELHIPIAINKCPKNIFKINTEVRVLLKHDDNPYVIGIDRGERNLLYIVVVDGKGNIVEQYSLNEIINNFNGIRIKTDYHSLLDKKEKERFEARQNWTSIENIKELKAGYISQVVHKICELVEKYDAVIALEDLNSGFKNSRVKVEKQVYQKFEKMLIDKLNYMVDKKSNPCATGGALKGYQITNKFESFKSMSTQNGFIFYIPAWLTSKIDPSTGFVNLLKTKYTSIADSKKFISSFDRIMYVPEEDLFEFALDYKNFSRTDADYIKKWKLYSYGNRIRIFRNPKKNNVFDWEEVCLTSAYKELFNKYGINYQQGDIRALLCEQSDKAFYSSFMALMSLMLQMRNSITGRTDVDFLISPVKNSDGIFYDSRNYEAQENAILPKNADANGAYNIARKVLWAIGQFKKAEDEKLDKVKIAISNKEWLEYAQTSVKH

SEQ ID NO: 407 - protein, 1376 aa, Synthetic construct
MSKLEKFTNCYSLSKTLRFKAIPVGKTQENIDNKRLLVEDEKRAEDYKGVKKLLDRYYLSFINDVLHSIKLKNLNNYISLFRKKTRTEKENKELENLEINLRKEIAKAFKGNEGYKSLFKKDIIETILPEFLDDKDEIALVNSFNGFTTAFTGFFDNRENMFSEEAKSTSIAFRCINENLTRYISNMDIFEKVDAIFDKHEVQEIKEKILNSDYDVEDFFEGEFFNFVLTQEGIDVYNAIIGGFVTESGEKIKGLNEYINLYNQKTKQKLPKFKPLYKQVLSDRESLSFYGEGSSGENQTTQKGQKNSRERMKRIEEGIKELGSQILKEHPVENTQLQNEKLYLYYLQNGRDMYVDQELDINRLSDYDVDHIVPQSFLKDDSIDNKVLTRSDKNRGKSDNVPSEEVVKKMKNYWRQLLNAKLITQRKFDNLTKAERGGLSGYTSDEEVLEVFRNTLNKNSEIFSSIKKLEKLFKNFDEYSSAGIFVKNGPAISTISKDIFGEWNVIRDKWNAEYDDIHLKKKAVVTEKYEDDRRKSFKKIGSFSLEQLQEYADADLSVVEKLKEIIIQKVDEIYKVYGSSEKLFDADFVLEKSLKKNDAVVAIMKDLLDSVKSFENYIKAFFGEGKETNRDESFYGDFVLAYDILLKVDHIYDAIRNYVTQKPYSKDKFKLYFQNPQFMGGWDKDKETDYRATILRYGSKYYLAIMDKKYAKCLQKIDKDDVNGNYEKINYKLLPGPNKMLPKVFFSKKWMAYYNPSEDIQKIYKNGTFKKGDMFNLNDCHKLIDFFKDSISRYPKWSNAYDFNFSETEKYKDIAGFYREVEEQGYKVSFESASKKEVDKLVEEGKLYMFQIYNKDFSDKSHGTPNLHTMYFKLLFDENNHGQIRLSGGAELFMRRASLKKEELVVHPANSPIANKNPDNPKKTTTLSYDVYKDKRFSEDQYELHIPIAINKCPKNIFKINTEVRVLLKHDDNPYVIGIDRGERNLLYIVVVDGKGNIVEQYSLNEIINNFNGIRIKTDYHSLLDKKEKERFEARQNWTSIERIKELKAGYISQVVHKICELVEKYDAVIALEDLNSGFKNSRVKVEKQVYQKFEKMLIDKLNYMVDKKSNPCATGGALKGYQITNKFESFKSMSTQNGFIFYIPAWLTSKIDPSTGFVNLLKTKYTSIADSKKFISSFDRIMYVPEEDLFEFALDYKNFSRTDADYIKKWKLYSYGNRIRIFRNPKKNNVFDWEEVCLTSAYKELFNKYGINYQQGDIRALLCEQSDKAFYSSFMALMSLMLQMRNSITGRTDVDFLISPVKNSDGIFYDSRNYEAQENAILPKNADANGAYNIARKVLWAIGQFKKAEDEKLDKVKIAISNKEWLEYAQTSVKH

SEQ ID NO: 408 - protein, 1376 aa, Synthetic construct
MSKLEKFTNCYSLSKTLRFKAIPVGKTQENIDNKRLLVEDEKRAEDYKGVKKLLDRYYLSFINDVLHSIKLKNLNNYISLFRKKTRTEKENKELENLEINLRKEIAKAFKGNEGYKSLFKKDIIETILPEFLDDKDEIALVNSFNGFTTAFTGFFDNRENMFSEEAKSTSIAFRCINENLTRYISNMDIFEKVDAIFDKHEVQEIKEKILNSDYDVEDFFEGEFFNFVLTQEGIDVYNAIIGGFVTESGEKIKGLNEYINLYNQKTKQKLPKFKPLYKQVLSDRESLSFYGEGSSGENQTTQKGQKNSRERMKRIEEGIKELGSQILKEHPVENTQLQNEKLYLYYLQNGRDMYVDQELDINRLSDYDVDHIVPQSFLKDDSIDNKVLTRSDKNRGKSDNVPSEEVVKKMKNYWRQLLNAKLITQRKFDNLTKAERGGLSGYTSDEEVLEVFRNTLNKNSEIFSSIKKLEKLFKNFDEYSSAGIFVKNGPAISTISKDIFGEWNVIRDKWNAEYDDIHLKKKAVVTEKYEDDRRKSFKKIGSFSLEQLQEYADADLSVVEKLKEIIIQKVDEIYKVYGSSEKLFDADFVLEKSLKKNDAVVAIMKDLLDSVKSFENYIKAFFGEGKETNRDESFYGDFVLAYDILLKVDHIYDAIRNYVTQKPYSKDKFKLYFQNPQFMGGWDKDKETDYRATILRYGSKYYLAIMDKKYAKCLQKIDKDDVNGNYEKINYKLLPGPNKMLPKVFFSKKWMAYYNPSEDIQKIYKNGTFKKGDMFNLNDCHKLIDFFKDSISRYPKWSNAYDFNFSETEKYKDIAGFYREVEEQGYKVSFESASKKEVDKLVEEGKLYMFQIYNKDFSDKSHGTPNLHTMYFKLLFDENNHGQIRLSGGAELFMRRASLKKEELVVHPANSPIANKNPDNPKKTTTLSYDVYKDKRFSEDQYELHIPIAINKCPKNIFKINTEVRVLLKHDDNPYVIGIDRGERNLLYIVVVDGKGNIVEQYSLNEIINNFNGIRIKTDYHSLLDKKEKERFEARQNWTSIENIRELKAGYISQVVHKICELVEKYDAVIALEDLNSGFKNSRVKVEKQVYQKFEKMLIDKLNYMVDKKSNPCATGGALKGYQITNKFESFKSMSTQNGFIFYIPAWLTSKIDPSTGFVNLLKTKYTSIADSKKFISSFDRIMYVPEEDLFEFALDYKNFSRTDADYIKKWKLYSYGNRIRIFRNPKKNNVFDWEEVCLTSAYKELFNKYGINYQQGDIRALLCEQSDKAFYSSFMALMSLMLQMRNSITGRTDVDFLISPVKNSDGIFYDSRNYEAQENAILPKNADANGAYNIARKVLWAIGQFKKAEDEKLDKVKIAISNKEWLEYAQTSVKH

SEQ ID NO: 409 - protein, 1376 aa, Synthetic construct
MSKLEKFTNCYSLSKTLRFKAIPVGKTQENIDNKRLLVEDEKRAEDYKGVKKLLDRYYLSFINDVLHSIKLKNLNNYISLFRKKTRTEKENKELENLEINLRKEIAKAFKGNEGYKSLFKKDIIETILPEFLDDKDEIALVNSFNGFTTAFTGFFDNRENMFSEEAKSTSIAFRCINENLTRYISNMDIFEKVDAIFDKHEVQEIKEKILNSDYDVEDFFEGEFFNFVLTQEGIDVYNAIIGGFVTESGEKIKGLNEYINLYNQKTKQKLPKFKPLYKQVLSDRESLSFYGEGSSGENQTTQKGQKNSRERMKRIEEGIKELGSQILKEHPVENTQLQNEKLYLYYLQNGRDMYVDQELDINRLSDYDVDHIVPQSFLKDDSIDNKVLTRSDKNRGKSDNVPSEEVVKKMKNYWRQLLNAKLITQRKFDNLTKAERGGLSGYTSDEEVLEVFRNTLNKNSEIFSSIKKLEKLFKNFDEYSSAGIFVKNGPAISTISKDIFGEWNVIRDKWNAEYDDIHLKKKAVVTEKYEDDRRKSFKKIGSFSLEQLQEYADADLSVVEKLKEIIIQKVDEIYKVYGSSEKLFDADFVLEKSLKKNDAVVAIMKDLLDSVKSFENYIKAFFGEGKETNRDESFYGDFVLAYDILLKVDHIYDAIRNYVTQKPYSKDKFKLYFQNPQFMGGWDKDKETDYRATILRYGSKYYLAIMDKKYAKCLQKIDKDDVNGNYEKINYKLLPGPNKMLPKVFFSKKWMAYYNPSEDIQKIYKNGTFKKGDMFNLNDCHKLIDFFKDSISRYPKWSNAYDFNFSETEKYKDIAGFYREVEEQGYKVSFESASKKEVDKLVEEGKLYMFQIYNKDFSDKSHGTPNLHTMYFKLLFDENNHGQIRLSGGAELFMRRASLKKEELVVHPANSPIANKNPDNPKKTTTLSYDVYKDKRFSEDQYELHIPIAINKCPKNIFKINTEVRVLLKHDDNPYVIGIDRGERNLLYIVVVDGKGNIVEQYSLNEIINNFNGIRIKTDYHSLLDKKEKERFEARQNWTSIENIKELKAGYISQVVHKICELVEKYDAVIALEDLNSGFKNSRVKVEKQVYRKFEKMLIDKLNYMVDKKSNPCATGGALKGYQITNKFESFKSMSTQNGFIFYIPAWLTSKIDPSTGFVNLLKTKYTSIADSKKFISSFDRIMYVPEEDLFEFALDYKNFSRTDADYIKKWKLYSYGNRIRIFRNPKKNNVFDWEEVCLTSAYKELFNKYGINYQQGDIRALLCEQSDKAFYSSFMALMSLMLQMRNSITGRTDVDFLISPVKNSDGIFYDSRNYEAQENAILPKNADANGAYNIARKVLWAIGQFKKAEDEKLDKVKIAISNKEWLEYAQTSVKH

SEQ ID NO: 410 - protein, 1376 aa, Synthetic construct
MSKLEKFTNCYSLSKTLRFKAIPVGKTQENIDNKRLLVEDEKRAEDYKGVKKLLDRYYLSFINDVLHSIKLKNLNNYISLFRKKTRTEKENKELENLEINLRKEIAKAFKGNEGYKSLFKKDIIETILPEFLDDKDEIALVNSFNGFTTAFTGFFDNRENMFSEEAKSTSIAFRCINENLTRYISNMDIFEKVDAIFDKHEVQEIKEKILNSDYDVEDFFEGEFFNFVLTQEGIDVYNAIIGGFVTESGEKIKGLNEYINLYNQKTKQKLPKFKPLYKQVLSDRESLSFYGEGSSGENQTTQKGQKNSRERMKRIEEGIKELGSQILKEHPVENTQLQNEKLYLYYLQNGRDMYVDQELDINRLSDYDVDHIVPQSFLKDDSIDNKVLTRSDKNRGKSDNVPSEEVVKKMKNYWRQLLNAKLITQRKFDNLTKAERGGLSGYTSDEEVLEVFRNTLNKNSEIFSSIKKLEKLFKNFDEYSSAGIFVKNGPAISTISKDIFGEWNVIRDKWNAEYDDIHLKKKAVVTEKYEDDRRKSFKKIGSFSLEQLQEYADADLSVVEKLKEIIIQKVDEIYKVYGSSEKLFDADFVLEKSLKKNDAVVAIMKDLLDSVKSFENYIKAFFGEGKETNRDESFYGDFVLAYDILLKVDHIYDAIRNYVTQKPYSKDKFKLYFQNPQFMGGWDKDKETDYRATILRYGSKYYLAIMDKKYAKCLQKIDKDDVNGNYEKINYKLLPGPNKMLPKVFFSKKWMAYYNPSEDIQKIYKNGTFKKGDMFNLNDCHKLIDFFKDSISRYPKWSNAYDFNFSETEKYKDIAGFYREVEEQGYKVSFESASKKEVDKLVEEGKLYMFQIYNKDFSDKSHGTPNLHTMYFKLLFDENNHGQIRLSGGAELFMRRASLKKEELVVHPANSPIANKNPDNPKKTTTLSYDVYKDKRFSEDQYELHIPIAINKCPKNIFKINTEVRVLLKHDDNPYVIGIDRGERNLLYIVVVDGKGNIVEQYSLNEIINNFNGIRIKTDYHSLLDKKEKERFEARQNWTSIENIKELKAGYISQVVHKICELVEKYDAVIALEDLNSGFKNSRVKVEKQVYQRFEKMLIDKLNYMVDKKSNPCATGGALKGYQITNKFESFKSMSTQNGFIFYIPAWLTSKIDPSTGFVNLLKTKYTSIADSKKFISSFDRIMYVPEEDLFEFALDYKNFSRTDADYIKKWKLYSYGNRIRIFRNPKKNNVFDWEEVCLTSAYKELFNKYGINYQQGDIRALLCEQSDKAFYSSFMALMSLMLQMRNSITGRTDVDFLISPVKNSDGIFYDSRNYEAQENAILPKNADANGAYNIARKVLWAIGQFKKAEDEKLDKVKIAISNKEWLEYAQTSVKH

SEQ ID NO: 411 - protein, 1376 aa, Synthetic construct
MSKLEKFTNCYSLSKTLRFKAIPVGKTQENIDNKRLLVEDEKRAEDYKGVKKLLDRYYLSFINDVLHSIKLKNLNNYISLFRKKTRTEKENKELENLEINLRKEIAKAFKGNEGYKSLFKKDIIETILPEFLDDKDEIALVNSFNGFTTAFTGFFDNRENMFSEEAKSTSIAFRCINENLTRYISNMDIFEKVDAIFDKHEVQEIKEKILNSDYDVEDFFEGEFFNFVLTQEGIDVYNAIIGGFVTESGEKIKGLNEYINLYNQKTKQKLPKFKPLYKQVLSDRESLSFYGEGSSGENQTTQKGQKNSRERMKRIEEGIKELGSQILKEHPVENTQLQNEKLYLYYLQNGRDMYVDQELDINRLSDYDVDHIVPQSFLKDDSIDNKVLTRSDKNRGKSDNVPSEEVVKKMKNYWRQLLNAKLITQRKFDNLTKAERGGLSGYTSDEEVLEVFRNTLNKNSEIFSSIKKLEKLFKNFDEYSSAGIFVKNGPAISTISKDIFGEWNVIRDKWNAEYDDIHLKKKAVVTEKYEDDRRKSFKKIGSFSLEQLQEYADADLSVVEKLKEIIIQKVDEIYKVYGSSEKLFDADFVLEKSLKKNDAVVAIMKDLLDSVKSFENYIKAFFGEGKETNRDESFYGDFVLAYDILLKVDHIYDAIRNYVTQKPYSKDKFKLYFQNPQFMGGWDKDKETDYRATILRYGSKYYLAIMDKKYAKCLQKIDKDDVNGNYEKINYKLLPGPNKMLPKVFFSKKWMAYYNPSEDIQKIYKNGTFKKGDMFNLNDCHKLIDFFKDSISRYPKWSNAYDFNFSETEKYKDIAGFYREVEEQGYKVSFESASKKEVDKLVEEGKLYMFQIYNKDFSDKSHGTPNLHTMYFKLLFDENNHGQIRLSGGAELFMRRASLKKEELVVHPANSPIANKNPDNPKKTTTLSYDVYKDKRFSEDQYELHIPIAINKCPKNIFKINTEVRVLLKHDDNPYVIGIDRGERNLLYIVVVDGKGNIVEQYSLNEIINNFNGIRIKTDYHSLLDKKEKERFEARQNWTSIENIKELKAGYISQVVHKICELVEKYDAVIALEDLNSGFKNSRVKVEKQVYQKFERMLIDKLNYMVDKKSNPCATGGALKGYQITNKFESFKSMSTQNGFIFYIPAWLTSKIDPSTGFVNLLKTKYTSIADSKKFISSFDRIMYVPEEDLFEFALDYKNFSRTDADYIKKWKLYSYGNRIRIFRNPKKNNVFDWEEVCLTSAYKELFNKYGINYQQGDIRALLCEQSDKAFYSSFMALMSLMLQMRNSITGRTDVDFLISPVKNSDGIFYDSRNYEAQENAILPKNADANGAYNIARKVLWAIGQFKKAEDEKLDKVKIAISNKEWLEYAQTSVKH

SEQ ID NO: 412 - protein, 1376 aa, Synthetic construct
MSKLEKFTNCYSLSKTLRFKAIPVGKTQENIDNKRLLVEDEKRAEDYKGVKKLLDRYYLSFINDVLHSIKLKNLNNYISLFRKKTRTEKENKELENLEINLRKEIAKAFKGNEGYKSLFKKDIIETILPEFLDDKDEIALVNSFNGFTTAFTGFFDNRENMFSEEAKSTSIAFRCINENLTRYISNMDIFEKVDAIFDKHEVQEIKEKILNSDYDVEDFFEGEFFNFVLTQEGIDVYNAIIGGFVTESGEKIKGLNEYINLYNQKTKQKLPKFKPLYKQVLSDRESLSFYGEGSSGENQTTQKGQKNSRERMKRIEEGIKELGSQILKEHPVENTQLQNEKLYLYYLQNGRDMYVDQELDINRLSDYDVDHIVPQSFLKDDSIDNKVLTRSDKNRGKSDNVPSEEVVKKMKNYWRQLLNAKLITQRKFDNLTKAERGGLSGYTSDEEVLEVFRNTLNKNSEIFSSIKKLEKLFKNFDEYSSAGIFVKNGPAISTISKDIFGEWNVIRDKWNAEYDDIHLKKKAVVTEKYEDDRRKSFKKIGSFSLEQLQEYADADLSVVEKLKEIIIQKVDEIYKVYGSSEKLFDADFVLEKSLKKNDAVVAIMKDLLDSVKSFENYIKAFFGEGKETNRDESFYGDFVLAYDILLKVDHIYDAIRNYVTQKPYSKDKFKLYFQNPQFMGGWDKDKETDYRATILRYGSKYYLAIMDKKYAKCLQKIDKDDVNGNYEKINYKLLPGPNKMLPKVFFSKKWMAYYNPSEDIQKIYKNGTFKKGDMFNLNDCHKLIDFFKDSISRYPKWSNAYDFNFSETEKYKDIAGFYREVEEQGYKVSFESASKKEVDKLVEEGKLYMFQIYNKDFSDKSHGTPNLHTMYFKLLFDENNHGQIRLSGGAELFMRRASLKKEELVVHPANSPIANKNPDNPKKTTTLSYDVYKDKRFSEDQYELHIPIAINKCPKNIFKINTEVRVLLKHDDNPYVIGIDRGERNLLYIVVVDGKGNIVEQYSLNEIINNFNGIRIKTDYHSLLDKKEKERFEARQNWTSIENIKELKAGYISQVVHKICELVEKYDAVIALEDLNSGFKNSRVKVEKQVYQKFEKMLIDKLNYMVDKKSNPCATGGALKGYQITNRFESFKSMSTQNGFIFYIPAWLTSKIDPSTGFVNLLKTKYTSIADSKKFISSFDRIMYVPEEDLFEFALDYKNFSRTDADYIKKWKLYSYGNRIRIFRNPKKNNVFDWEEVCLTSAYKELFNKYGINYQQGDIRALLCEQSDKAFYSSFMALMSLMLQMRNSITGRTDVDFLISPVKNSDGIFYDSRNYEAQENAILPKNADANGAYNIARKVLWAIGQFKKAEDEKLDKVKIAISNKEWLEYAQTSVKH

SEQ ID NO: 413 - protein, 1376 aa, Synthetic construct
MSKLEKFTNCYSLSKTLRFKAIPVGKTQENIDNKRLLVEDEKRAEDYKGVKKLLDRYYLSFINDVLHSIKLKNLNNYISLFRKKTRTEKENKELENLEINLRKEIAKAFKGNEGYKSLFKKDIIETILPEFLDDKDEIALVNSFNGFTTAFTGFFDNRENMFSEEAKSTSIAFRCINENLTRYISNMDIFEKVDAIFDKHEVQEIKEKILNSDYDVEDFFEGEFFNFVLTQEGIDVYNAIIGGFVTESGEKIKGLNEYINLYNQKTKQKLPKFKPLYKQVLSDRESLSFYGEGSSGENQTTQKGQKNSRERMKRIEEGIKELGSQILKEHPVENTQLQNEKLYLYYLQNGRDMYVDQELDINRLSDYDVDHIVPQSFLKDDSIDNKVLTRSDKNRGKSDNVPSEEVVKKMKNYWRQLLNAKLITQRKFDNLTKAERGGLSGYTSDEEVLEVFRNTLNKNSEIFSSIKKLEKLFKNFDEYSSAGIFVKNGPAISTISKDIFGEWNVIRDKWNAEYDDIHLKKKAVVTEKYEDDRRKSFKKIGSFSLEQLQEYADADLSVVEKLKEIIIQKVDEIYKVYGSSEKLFDADFVLEKSLKKNDAVVAIMKDLLDSVKSFENYIKAFFGEGKETNRDESFYGDFVLAYDILLKVDHIYDAIRNYVTQKPYSKDKFKLYFQNPQFMGGWDKDKETDYRATILRYGSKYYLAIMDKKYAKCLQKIDKDDVNGNYEKINYKLLPGPNKMLPKVFFSKKWMAYYNPSEDIQKIYKNGTFKKGDMFNLNDCHKLIDFFKDSISRYPKWSNAYDFNFSETEKYKDIAGFYREVEEQGYKVSFESASKKEVDKLVEEGKLYMFQIYNKDFSDKSHGTPNLHTMYFKLLFDENNHGQIRLSGGAELFMRRASLKKEELVVHPANSPIANKNPDNPKKTTTLSYDVYKDKRFSEDQYELHIPIAINKCPKNIFKINTEVRVLLKHDDNPYVIGIDRGERNLLYIVVVDGKGNIVEQYSLNEIINNFNGIRIKTDYHSLLDKKEKERFEARQNWTSIENIKELKAGYISQVVHKICELVEKYDAVIALEDLNSGFKNSRVKVEKQVYQKFEKMLIDKLNYMVDKKSNPCATGGALKGYQITNKFRSFKSMSTQNGFIFYIPAWLTSKIDPSTGFVNLLKTKYTSIADSKKFISSFDRIMYVPEEDLFEFALDYKNFSRTDADYIKKWKLYSYGNRIRIFRNPKKNNVFDWEEVCLTSAYKELFNKYGINYQQGDIRALLCEQSDKAFYSSFMALMSLMLQMRNSITGRTDVDFLISPVKNSDGIFYDSRNYEAQENAILPKNADANGAYNIARKVLWAIGQFKKAEDEKLDKVKIAISNKEWLEYAQTSVKH

SEQ ID NO: 414 - protein, 1376 aa, Synthetic construct
MSKLEKFTNCYSLSKTLRFKAIPVGKTQENIDNKRLLVEDEKRAEDYKGVKKLLDRYYLSFINDVLHSIKLKNLNNYISLFRKKTRTEKENKELENLEINLRKEIAKAFKGNEGYKSLFKKDIIETILPEFLDDKDEIALVNSFNGFTTAFTGFFDNRENMFSEEAKSTSIAFRCINENLTRYISNMDIFEKVDAIFDKHEVQEIKEKILNSDYDVEDFFEGEFFNFVLTQEGIDVYNAIIGGFVTESGEKIKGLNEYINLYNQKTKQKLPKFKPLYKQVLSDRESLSFYGEGSSGENQTTQKGQKNSRERMKRIEEGIKELGSQILKEHPVENTQLQNEKLYLYYLQNGRDMYVDQELDINRLSDYDVDHIVPQSFLKDDSIDNKVLTRSDKNRGKSDNVPSEEVVKKMKNYWRQLLNAKLITQRKFDNLTKAERGGLSGYTSDEEVLEVFRNTLNKNSEIFSSIKKLEKLFKNFDEYSSAGIFVKNGPAISTISKDIFGEWNVIRDKWNAEYDDIHLKKKAVVTEKYEDDRRKSFKKIGSFSLEQLQEYADADLSVVEKLKEIIIQKVDEIYKVYGSSEKLFDADFVLEKSLKKNDAVVAIMKDLLDSVKSFENYIKAFFGEGKETNRDESFYGDFVLAYDILLKVDHIYDAIRNYVTQKPYSKDKFKLYFQNPQFMGGWDKDKETDYRATILRYGSKYYLAIMDKKYAKCLQKIDKDDVNGNYEKINYKLLPGPNKMLPKVFFSKKWMAYYNPSEDIQKIYKNGTFKKGDMFNLNDCHKLIDFFKDSISRYPKWSNAYDFNFSETEKYKDIAGFYREVEEQGYKVSFESASKKEVDKLVEEGKLYMFQIYNKDFSDKSHGTPNLHTMYFKLLFDENNHGQIRLSGGAELFMRRASLKKEELVVHPANSPIANKNPDNPKKTTTLSYDVYKDKRFSEDQYELHIPIAINKCPKNIFKINTEVRVLLKHDDNPYVIGIDRGERNLLYIVVVDGKGNIVEQYSLNEIINNFNGIRIKTDYHSLLDKKEKERFEARQNWTSIENIKELKAGYISQVVHKICELVEKYDAVIALEDLNSGFKNSRVKVEKQVYQKFEKMLIDKLNYMVDKKSNPCATGGALKGYQITNKFERFKSMSTQNGFIFYIPAWLTSKIDPSTGFVNLLKTKYTSIADSKKFISSFDRIMYVPEEDLFEFALDYKNFSRTDADYIKKWKLYSYGNRIRIFRNPKKNNVFDWEEVCLTSAYKELFNKYGINYQQGDIRALLCEQSDKAFYSSFMALMSLMLQMRNSITGRTDVDFLISPVKNSDGIFYDSRNYEAQENAILPKNADANGAYNIARKVLWAIGQFKKAEDEKLDKVKIAISNKEWLEYAQTSVKH

SEQ ID NO: 415 - protein, 1376 aa, Synthetic construct
MSKLEKFTNCYSLSKTLRFKAIPVGKTQENIDNKRLLVEDEKRAEDYKGVKKLLDRYYLSFINDVLHSIKLKNLNNYISLFRKKTRTEKENKELENLEINLRKEIAKAFKGNEGYKSLFKKDIIETILPEFLDDKDEIALVNSFNGFTTAFTGFFDNRENMFSEEAKSTSIAFRCINENLTRYISNMDIFEKVDAIFDKHEVQEIKEKILNSDYDVEDFFEGEFFNFVLTQEGIDVYNAIIGGFVTESGEKIKGLNEYINLYNQKTKQKLPKFKPLYKQVLSDRESLSFYGEGSSGENQTTQKGQKNSRERMKRIEEGIKELGSQILKEHPVENTQLQNEKLYLYYLQNGRDMYVDQELDINRLSDYDVDHIVPQSFLKDDSIDNKVLTRSDKNRGKSDNVPSEEVVKKMKNYWRQLLNAKLITQRKFDNLTKAERGGLSGYTSDEEVLEVFRNTLNKNSEIFSSIKKLEKLFKNFDEYSSAGIFVKNGPAISTISKDIFGEWNVIRDKWNAEYDDIHLKKKAVVTEKYEDDRRKSFKKIGSFSLEQLQEYADADLSVVEKLKEIIIQKVDEIYKVYGSSEKLFDADFVLEKSLKKNDAVVAIMKDLLDSVKSFENYIKAFFGEGKETNRDESFYGDFVLAYDILLKVDHIYDAIRNYVTQKPYSKDKFKLYFQNPQFMGGWDKDKETDYRATILRYGSKYYLAIMDKKYAKCLQKIDKDDVNGNYEKINYKLLPGPNKMLPKVFFSKKWMAYYNPSEDIQKIYKNGTFKKGDMFNLNDCHKLIDFFKDSISRYPKWSNAYDFNFSETEKYKDIAGFYREVEEQGYKVSFESASKKEVDKLVEEGKLYMFQIYNKDFSDKSHGTPNLHTMYFKLLFDENNHGQIRLSGGAELFMRRASLKKEELVVHPANSPIANKNPDNPKKTTTLSYDVYKDKRFSEDQYELHIPIAINKCPKNIFKINTEVRVLLKHDDNPYVIGIDRGERNLLYIVVVDGKGNIVEQYSLNEIINNFNGIRIKTDYHSLLDKKEKERFEARQNWTSIENIKELKAGYISQVVHKICELVEKYDAVIALEDLNSGFKNSRVKVEKQVYQKFEKMLIDKLNYMVDKKSNPCATGGALKGYQITNKFESFRSMSTQNGFIFYIPAWLTSKIDPSTGFVNLLKTKYTSIADSKKFISSFDRIMYVPEEDLFEFALDYKNFSRTDADYIKKWKLYSYGNRIRIFRNPKKNNVFDWEEVCLTSAYKELFNKYGINYQQGDIRALLCEQSDKAFYSSFMALMSLMLQMRNSITGRTDVDFLISPVKNSDGIFYDSRNYEAQENAILPKNADANGAYNIARKVLWAIGQFKKAEDEKLDKVKIAISNKEWLEYAQTSVKH

SEQ ID NO: 416 - protein, 1376 aa, Synthetic construct
MSKLEKFTNCYSLSKTLRFKAIPVGKTQENIDNKRLLVEDEKRAEDYKGVKKLLDRYYLSFINDVLHSIKLKNLNNYISLFRKKTRTEKENKELENLEINLRKEIAKAFKGNEGYKSLFKKDIIETILPEFLDDKDEIALVNSFNGFTTAFTGFFDNRENMFSEEAKSTSIAFRCINENLTRYISNMDIFEKVDAIFDKHEVQEIKEKILNSDYDVEDFFEGEFFNFVLTQEGIDVYNAIIGGFVTESGEKIKGLNEYINLYNQKTKQKLPKFKPLYKQVLSDRESLSFYGEGSSGENQTTQKGQKNSRERMKRIEEGIKELGSQILKEHPVENTQLQNEKLYLYYLQNGRDMYVDQELDINRLSDYDVDHIVPQSFLKDDSIDNKVLTRSDKNRGKSDNVPSEEVVKKMKNYWRQLLNAKLITQRKFDNLTKAERGGLSGYTSDEEVLEVFRNTLNKNSEIFSSIKKLEKLFKNFDEYSSAGIFVKNGPAISTISKDIFGEWNVIRDKWNAEYDDIHLKKKAVVTEKYEDDRRKSFKKIGSFSLEQLQEYADADLSVVEKLKEIIIQKVDEIYKVYGSSEKLFDADFVLEKSLKKNDAVVAIMKDLLDSVKSFENYIKAFFGEGKETNRDESFYGDFVLAYDILLKVDHIYDAIRNYVTQKPYSKDKFKLYFQNPQFMGGWDKDKETDYRATILRYGSKYYLAIMDKKYAKCLQKIDKDDVNGNYEKINYKLLPGPNKMLPKVFFSKKWMAYYNPSEDIQKIYKNGTFKKGDMFNLNDCHKLIDFFKDSISRYPKWSNAYDFNFSETEKYKDIAGFYREVEEQGYKVSFESASKKEVDKLVEEGKLYMFQIYNKDFSDKSHGTPNLHTMYFKLLFDENNHGQIRLSGGAELFMRRASLKKEELVVHPANSPIANKNPDNPKKTTTLSYDVYKDKRFSEDQYELHIPIAINKCPKNIFKINTEVRVLLKHDDNPYVIGIDRGERNLLYIVVVDGKGNIVEQYSLNEIINNFNGIRIKTDYHSLLDKKEKERFEARQNWTSIENIKELKAGYISQVVHKICELVEKYDAVIALEDLNSGFKNSRVKVEKQVYQKFEKMLIDKLNYMVDKKSNPCATGGALKGYQITNKFESFKRMSTQNGFIFYIPAWLTSKIDPSTGFVNLLKTKYTSIADSKKFISSFDRIMYVPEEDLFEFALDYKNFSRTDADYIKKWKLYSYGNRIRIFRNPKKNNVFDWEEVCLTSAYKELFNKYGINYQQGDIRALLCEQSDKAFYSSFMALMSLMLQMRNSITGRTDVDFLISPVKNSDGIFYDSRNYEAQENAILPKNADANGAYNIARKVLWAIGQFKKAEDEKLDKVKIAISNKEWLEYAQTSVKH

SEQ ID NO: 417 - protein, 1375 aa, synthetic construct
SKLEKFTNCYSLSKTLRFKAIPVGKTQENIDNKRLLVEDEKRAEDYKGVKKLLDRYYLSFINDVLHSIKLKNLNNYISLFRKKTRTEKENKELENLEINLRKEIAKAFKGNEGYKSLFKKDIIETILPEFLDDKDEIALVNSFNGFTTAFTGFFDNRRNMFSEEAKSTSIAFRCINENLTRYISNMDIFEKVDAIFDKHEVQEIKEKILNSDYDVEDFFEGEFFNFVLTQEGIDVYNAIIGGFVTESGEKIKGLNEYINLYNQKTKQKLPKFKPLYKQVLSDRESLSFYGEGSSGENQTTQKGQKNSRERMKRIEEGIKELGSQILKEHPVENTQLQNEKLYLYYLQNGRDMYVDQELDINRLSDYDVDHIVPQSFLKDDSIDNKVLTRSDKNRGKSDNVPSEEVVKKMKNYWRQLLNAKLITQRKFDNLTKAERGGLSGYTSDEEVLEVFRNTLNKNSEIFSSIKKLEKLFKNFDEYSSAGIFVKNGPAISTISKDIFGEWNVIRDKWNAEYDDIHLKKKAVVTEKYEDDRRKSFKKIGSFSLEQLQEYADADLSVVEKLKEIIIQKVDEIYKVYGSSEKLFDADFVLEKSLKKNDAVVAIMKDLLDSVKSFENYIKAFFGEGKETNRDESFYGDFVLAYDILLKVDHIYDAIRNYVTQRPYSKDKFKLYFQNPQFMGGWDKDKETDYRATILRYGSKYYLAIMDKKYAKCLQKIDKDDVNGNYEKINYKLLPGPNKMLPKVFFSKKWMAYYNPSEDIQKIYKNGTFKKGDMFNLNDCHKLIDFFKDSISRYPKWSNAYDFNFSETEKYKDIAGFYREVEEQGYKVSFESASKKEVDKLVEEGKLYMFQIYNKDFSDKSHGTPNLHTMYFKLLFDENNHGQIRLSGGAELFMRRASLKKEELVVHPANSPIANKNPDNPKKTTTLSYDVYKDKRFSEDQYELHIPIAINKCPKNIFKINTEVRVLLKHDDNPYVIGIDRGERNLLYIVVVDGKGNIVEQYSLNEIINNFNGIRIKTDYHSLLDKKEKERFEARQNWTSIENIKELKAGYISQVVHKICELVEKYDAVIALEDLNSGFKNSRVKVEKQVYQKFEKMLIDKLNYMVDKKSNPCATGGALKGYQITNKFRSFKSMSTQNGFIFYIPAWLTSKIDPSTGFVNLLKTKYTSIADSKKFISSFDRIMYVPEEDLFEFALDYKNFSRTDADYIKKWKLYSYGNRIRIFRNPKKNNVFDWEEVCLTSAYKELFNKYGINYQQGDIRALLCEQSDKAFYSSFMALMSLMLQMRNSITGRTDVDFLISPVKNSDGIFYDSRNYEAQENAILPKNADANGAYNIARKVLWAIGQFKKAEDEKLDKVKIAISNKEWLEYAQTSVKH

SEQ ID NO: 418 - protein, 1375 aa, synthetic construct
SKLEKFTNCYSLSKTLRFKAIPVGKTQENIDNKRLLVEDEKRAEDYKGVKKLLDRYYLSFINDVLHSIKLKNLNNYISLFRKKTRTEKENKELENLEINLRKEIAKAFKGNEGYKSLFKKDIIETILPEFLDDKDEIALVNSFNGFTTAFTGFFDNRENMFSEEAKSTSIAFRCINENLTRYISNMDIFEKVDAIFDKHEVQEIKEKILNSDYDVEDFFEGEFFNFVLTQEGIDVYNAIIGGFVTESGEKIKGLNEYINLYNQKTKQKLPKFKPLYKQVLSDRESLSFYGEGSSGENQTTQKGQKNSRERMKRIEEGIKELGSQILKEHPVENTQLQNEKLYLYYLQNGRDMYVDQELDINRLSDYDVDHIVPQSFLKDDSIDNKVLTRSDKNRGKSDNVPSEEVVKKMKNYWRQLLNAKLITQRKFDNLTKAERGGLSGYTSDEEVLEVFRNTLNKNSEIFSSIKKLEKLFKNFDEYSSAGIFVKNGPAISTISKDIFGEWNVIRDKWNAEYDDIHLKKKAVVTEKYEDDRRKSFKKIGSFSLEQLQEYADADLSVVEKLKEIIIQKVDEIYKVYGSSEKLFDADFVLEKSLKKNDAVVAIMKDLLDSVKSFENYIKAFFGEGKETNRDESFYGDFVLAYDILLKVDHIYDAIRNYVTQRPYSKDKFKLYFQNPQFMGGWDKDKETDYRATILRYGSKYYLAIMDKKYAKCLQKIDKDDVNGNYEKINYKLLPGPNKMLPKVFFSKKWMAYYNPSEDIQKIYKNGTFKKGDMFNLNDCHKLIDFFKDSISRYPKWSNAYDFNFSETEKYKDIAGFYREVEEQGYKVSFESASKKEVDKLVEEGKLYMFQIYNKDFSDKSHGTPNLHTMYFKLLFDENNHGQIRLSGGAELFMRRASLKKEELVVHPANSPIANKNPDNPKKTTTLSYDVYKDKRFSEDQYELHIPIAINKCPKNIFKINTEVRVLLKHDDNPYVIGIDRGERNLLYIVVVDGKGNIVEQYSLNEIINNFNGIRIKTDYHSLLDKKEKERFEARQNWTSIENIKELKAGYISQVVHKICELVEKYDAVIALEDLNSGFKNSRVKVEKQVYQKFEKMLIDKLNYMVDKKSNPCATGGALKGYQITNKFRSFKSMSTQNGFIFYIPAWLTSKIDPSTGFVNLLKTKYTSIADSKKFISSFDRIMYVPEEDLFEFALDYKNFSRTDADYIKKWKLYSYGNRIRIFRNPKKNNVFDWEEVCLTSAYKELFNKYGINYQQGDIRALLCEQSDKAFYSSFMALMSLMLQMRNSITGRTDVDFLISPVKNSDGIFYDSRNYEAQENAILPKNADANGAYNIARKVLWAIGQFKKAEDEKLDKVKIAISNKEWLEYAQTSVKH

SEQ ID NO: 419 - protein, 1375 aa, synthetic construct
SKLEKFTNCYSLSKTLRFKAIPVGKTQENIDNKRLLVEDEKRAEDYKGVKKLLDRYYLSFINDVLHSIKLKNLNNYISLFRKKTRTEKENKELENLEINLRKEIAKAFKGNEGYKSLFKKDIIETILPEFLDDKDEIALVNSFNGFTTAFTGFFDNRRNMFSEEAKSTSIAFRCINENLTRYISNMDIFEKVDAIFDKHEVQEIKEKILNSDYDVEDFFEGEFFNFVLTQEGIDVYNAIIGGFVTESGEKIKGLNEYINLYNQKTKQKLPKFKPLYKQVLSDRESLSFYGEGSSGENQTTQKGQKNSRERMKRIEEGIKELGSQILKEHPVENTQLQNEKLYLYYLQNGRDMYVDQELDINRLSDYDVDHIVPQSFLKDDSIDNKVLTRSDKNRGKSDNVPSEEVVKKMKNYWRQLLNAKLITQRKFDNLTKAERGGLSGYTSDEEVLEVFRNTLNKNSEIFSSIKKLEKLFKNFDEYSSAGIFVKNGPAISTISKDIFGEWNVIRDKWNAEYDDIHLKKKAVVTEKYEDDRRKSFKKIGSFSLEQLQEYADADLSVVEKLKEIIIQKVDEIYKVYGSSEKLFDADFVLEKSLKKNDAVVAIMKDLLDSVKSFENYIKAFFGEGKETNRDESFYGDFVLAYDILLKVDHIYDAIRNYVTQRPYSKDKFKLYFQNPQFMRGWDKDKETDYRATILRYGSKYYLAIMDKKYAKCLQKIDKDDVNGNYEKINYKLLPGPNKMLPRVFFSKKWMAYYNPSEDIQKIYKNGTFKKGDMFNLNDCHKLIDFFKDSISRYPKWSNAYDFNFSETEKYKDIAGFYREVEEQGYKVSFESASKKEVDKLVEEGKLYMFQIYNKDFSDKSHGTPNLHTMYFKLLFDENNHGQIRLSGGAELFMRRASLKKEELVVHPANSPIANKNPDNPKKTTTLSYDVYKDKRFSEDQYELHIPIAINKCPKNIFKINTEVRVLLKHDDNPYVIGIDRGERNLLYIVVVDGKGNIVEQYSLNEIINNFNGIRIKTDYHSLLDKKEKERFEARQNWTSIENIKELKAGYISQVVHKICELVEKYDAVIALEDLNSGFKNSRVKVEKQVYQKFEKMLIDKLNYMVDKKSNPCATGGALKGYQITNKFRSFKSMSTQNGFIFYIPAWLTSKIDPSTGFVNLLKTKYTSIADSKKFISSFDRIMYVPEEDLFEFALDYKNFSRTDADYIKKWKLYSYGNRIRIFRNPKKNNVFDWEEVCLTSAYKELFNKYGINYQQGDIRALLCEQSDKAFYSSFMALMSLMLQMRNSITGRTDVDFLISPVKNSDGIFYDSRNYEAQENAILPKNADANGAYNIARKVLWAIGQFKKAEDEKLDKVKIAISNKEWLEYAQTSVKH

SEQ ID NO: 420 - protein, 1375 aa, synthetic construct
SKLEKFTNCYSLSKTLRFKAIPVGKTQENIDNKRLLVEDEKRAEDYKGVKKLLDRYYLSFINDVLHSIKLKNLNNYISLFRKKTRTEKENKELENLEINLRKEIAKAFKGNEGYKSLFKKDIIETILPEFLDDKDEIALVNSFNGFTTAFTGFFDNRENMFSEEAKSTSIAFRCINENLTRYISNMDIFEKVDAIFDKHEVQEIKEKILNSDYDVEDFFEGEFFNFVLTQEGIDVYNAIIGGFVTESGEKIKGLNEYINLYNQKTKQKLPKFKPLYKQVLSDRESLSFYGEGSSGENQTTQKGQKNSRERMKRIEEGIKELGSQILKEHPVENTQLQNEKLYLYYLQNGRDMYVDQELDINRLSDYDVDHIVPQSFLKDDSIDNKVLTRSDKNRGKSDNVPSEEVVKKMKNYWRQLLNAKLITQRKFDNLTKAERGGLSGYTSDEEVLEVFRNTLNKNSEIFSSIKKLEKLFKNFDEYSSAGIFVKNGPAISTISKDIFGEWNVIRDKWNAEYDDIHLKKKAVVTEKYEDDRRKSFKKIGSFSLEQLQEYADADLSVVEKLKEIIIQKVDEIYKVYGSSEKLFDADFVLEKSLKKNDAVVAIMKDLLDSVKSFENYIKAFFGEGKETNRDESFYGDFVLAYDILLKVDHIYDAIRNYVTQRPYSKDKFKLYFQNPQFMRGWDKDKETDYRATILRYGSKYYLAIMDKKYAKCLQKIDKDDVNGNYEKINYKLLPGPNKMLPRVFFSKKWMAYYNPSEDIQKIYKNGTFKKGDMFNLNDCHKLIDFFKDSISRYPKWSNAYDFNFSETEKYKDIAGFYREVEEQGYKVSFESASKKEVDKLVEEGKLYMFQIYNKDFSDKSHGTPNLHTMYFKLLFDENNHGQIRLSGGAELFMRRASLKKEELVVHPANSPIANKNPDNPKKTTTLSYDVYKDKRFSEDQYELHIPIAINKCPKNIFKINTEVRVLLKHDDNPYVIGIDRGERNLLYIVVVDGKGNIVEQYSLNEIINNFNGIRIKTDYHSLLDKKEKERFEARQNWTSIENIKELKAGYISQVVHKICELVEKYDAVIALEDLNSGFKNSRVKVEKQVYQKFEKMLIDKLNYMVDKKSNPCATGGALKGYQITNKFRSFKSMSTQNGFIFYIPAWLTSKIDPSTGFVNLLKTKYTSIADSKKFISSFDRIMYVPEEDLFEFALDYKNFSRTDADYIKKWKLYSYGNRIRIFRNPKKNNVFDWEEVCLTSAYKELFNKYGINYQQGDIRALLCEQSDKAFYSSFMALMSLMLQMRNSITGRTDVDFLISPVKNSDGIFYDSRNYEAQENAILPKNADANGAYNIARKVLWAIGQFKKAEDEKLDKVKIAISNKEWLEYAQTSVKH

1. A protein comprising an amino acid sequence having at least 70%, 75%, 80%, 85%, 90%, 95%, 96%, 97%, 98%, 99% or more sequence identity to SEQ ID NO:386 when optimally aligned thereto, wherein the amino acid sequence, when optimally aligned to SEQ ID NO:386, has an arginine residue at amino acid residue 14, 152, 156, 157, 159, 160, 165, 167, 168, 169, 251, 257, 260, 264, 272, 497, 653, 657, 660, 662, 1043, 1045, 1092, 1093, 1096, 1127, 1129, 1130, 1132, and/or 1133 corresponding to the amino acid residue position numbering of SEQ ID NO:386.

2. The protein of claim 1, wherein the amino acid sequence, when optimally aligned to SEQ ID NO:386, has an arginine residue at two or more amino acid residue positions selected from the group consisting of amino acid residue 14, 152, 156, 157, 159, 160, 165, 167 168, 169, 251, 257, 260, 264, 272, 497, 653, 657, 660, 662, 1043, 1045, 1092, 1093, 1096, 1127, 1129, 1130, 1132, and 1133 corresponding to the amino acid residue position numbering of SEQ ID NO:386.

3. The protein of claim 1, wherein the amino acid sequence, when optimally aligned to SEQ ID NO:386, has an arginine residue at amino acid residue 14, 152, 156, 157, 159, 160, 165, 167, 168, 169, 251, 257, 260, 264, 272, 497, 653, 657, 660, 662, 1043, 1045, 1092, 1093, 1096, 1127, 1129, 1130, 1132, and/or 1133 corresponding to the amino acid residue position numbering of SEQ ID NO:386.

4. The protein of claim 1, wherein the amino acid sequence, when optimally aligned to SEQ ID NO:386, has an arginine residue at amino acid residue 152, 156, 159, and/or 160 corresponding to the amino acid residue position numbering of SEQ ID NO:386.

5. The protein of claim 1, wherein the amino acid sequence, when optimally aligned to SEQ ID NO:386, has an arginine residue at amino acid residue 662, 1129, and/or 1133 corresponding to the amino acid residue position numbering of SEQ ID NO:386.

6. The protein of claim 1, wherein the amino acid sequence, when optimally aligned to SEQ ID NO:386, has an arginine residue at amino acid residue 14, 272, 1043, and/or 1096 corresponding to the amino acid residue position numbering of SEQ ID NO:386.

7. A protein comprising an amino acid sequence having at least 70%, 75%, 80%, 85%, 90%, 95%, 96%, 97%, 98%, 99% or more sequence identity to SEQ ID NO:346 when optimally aligned thereto, wherein the amino acid sequence, when optimally aligned to SEQ ID NO:346, has an arginine residue at amino acid residue 14, 152, 156, 157, 159, 160, 165, 167, 168, 169, 251, 257, 260, 264, 272, 497, 653, 657, 660, 662, 1043, 1045, 1092, 1093, 1096, 1127, 1129, 1130, 1132, and/or 1133 corresponding to the amino acid residue position numbering of SEQ ID NO:346.

8.-12. (canceled)

13. The protein of claim 1, wherein the amino acid sequence has at least 70%, 75%, 80%, 85%, 90%, 95%, 96%, 97%, 98%, 99%, or 100% sequence identity to one or more of SEQ ID NOs:356-385 and 387-420.

14. A protein comprising an amino acid sequence having at least 70%, 75%, 80%, 85%, 90%, 95%, 96%, 97%, 98%, 99%, or 100% sequence identity to one or more of SEQ ID NOs:356-385 and 387-420, optionally wherein the amino acid sequence has 100% sequence identity to one of SEQ ID NOs:356-385 and 387-420.

15. The protein of claim 1, wherein the protein has increased nuclease activity and/or increased nickase activity compared to SEQ ID NO:386 and/or compared to any one of SEQ ID NOs:39-65 when measured under the same conditions.

16. The protein claim 1, wherein the protein provides improved INDEL formation compared to SEQ ID NO:386 and/or compared to any one of SEQ ID NOs:39-65 when measured under the same conditions.

17. The protein of claim 1, wherein the protein is a functional double-stranded nuclease.

18. The protein of claim 1, wherein the protein comprises an inactivating mutation in a nuclease active site.

19. The protein of claim 1, wherein the protein is a nuclease.

20. The protein of claim 1, further comprising a polypeptide of interest that is fused to the amino acid sequence.

21. The protein of claim 1, further comprising a recruitment polypeptide that is fused to the amino acid sequence.

22. A nucleic acid encoding the protein of claim 1.

23. A complex comprising:
the protein of claim 1; and
a guide nucleic acid.

24. (canceled)

25. An expression cassette codon optimized for expression in an organism, comprising:
a polynucleotide encoding a promoter sequence, and
a polynucleotide encoding the protein of claim 1,
wherein the polynucleotide encoding the protein is codon-optimized for expression in the organism.

26.-30. (canceled)

31. A method of modifying a target nucleic acid, the method comprising:
contacting the target nucleic acid with
the protein of claim 1; and
a guide nucleic acid, thereby modifying the target nucleic acid.

32. (canceled)
